(19) United States
(12) Patent Application Publication
(10) Pub. No.: US 2007/0190534 A1
(43) Pub. Date: Aug. 16, 2007

(54) Mitochondrial sites and genes associated with prostate cancer

(75) Inventors: Mark Birch-Machin, Gosforth (GB); Gabriel D. Dakubo, Thunder Bay (CA); Robert Thayer, Thunder Bay (CA); Ryan Parr, Thunder Bay (CA)

Correspondence Address: TORYS LLP, 79 WELLINGTON ST. WEST, SUITE 3000, TORONTO, ON, M5K 1N2, CA

(73) Assignee: Genesis Genomics Inc.

(21) Appl. No.: 11/339,751

(22) Filed: Jan. 26, 2006

Related U.S. Application Data
(63) Continuation-in-part of application No. PCT/CA04/02124, filed on Dec. 13, 2004.
Application No. PCT/CA04/02124 is a continuation-in-part of application No. 10/732,374, filed on Dec. 11, 2003.
Application No. 10/732,374 is a continuation-in-part of application No. PCT/CA02/00848, filed on Jun. 10, 2002.
(60) Provisional application No. 60/646,588, filed on Jan. 26, 2005.
(60) Provisional application No. 60/297,340, filed on Jun. 11, 2001.

(51) Int. Cl. C12Q 1/68; G06F 19/00; C07H 21/04

(52) U.S. Cl. 435/6; 435/287.2; 702/20; 536/23.2

(57) ABSTRACT

A cluster analysis of mutations in the mitochondrial genomes from malignant, adjacent benign and distant benign tissues from a sample of men having prostate cancer has determined that mutations in ND1, ND2, COX1 and CytB are indicative of prostate cancer. 97% (30/31) of the samples contained synonymous and non-synonymous mutations in these genes. 65% (20/31) of the samples contained non-synonymous mutations in these genes.

### CROSS REFERENCE TO RELATED APPLICATIONS

[0001] This application claims priority to U.S. 60/646,588 filed Jan. 26, 2005. This application is also a continuation-in-part of PCT/CA04/02124 filed Dec. 13, 2004, which is a continuation-in-part of U.S. Ser. No. 10/732,374 filed Dec. 11, 2003, which is a continuation-in-part of PCT/CA02/00848 filed Jun. 10, 2002, which claims priority to U.S. 60/297,340 filed Jun. 11, 2001. All earlier applications are herein incorporated by reference.

### SEQUENCE LISTING RECORDED ON COMPACT DISC INCORPORATED BY REFERENCE

[0002] This invention incorporates by reference all materials recorded in ONE compact disc labeled COPY 1, and duplicate thereof labeled COPY 2. The material recorded on the compact disc is the Sequence Listing contained in the file entitled “seq.listing.txt” created Jan. 25, 2006 and having 766 KB. The material in COPY 1 and COPY 2 is identical. Applicant also submits an identical computer readable form (CFR COPY 3) on compact disc. The material in the CFR COPY 3 is identical to the material in COPY 1 and COPY 2.

### TECHNICAL FIELD OF THE INVENTION

[0003] This invention is related to the field of mitochondrial genomics. In particular it is related to mutations in the mitochondrial genome and their utility as an indicator of the genesis of disease, for example detecting the presence of pre-neoplasia, neoplasia and progression towards potential malignancy even before common clinical symptoms are evident.

### BACKGROUND OF THE INVENTION

[0004] The current mega-trend in the biological sciences is the human genome project, and commercial exploitation of the data. However, there is an exceptional limitation to the use and implementation of this information as the data is not specific at the level of the individual. Incredibly the data is from only a few individuals, hardly representative of the variation present in human populations, rendering the data useful in general applications only. The staggering complexity of the human genome makes application on an individual basis impractical. To sequence completely one human nuclear genome the U.S. Department of Energy and the National Institute of Health have invested 2.5 billion dollars since 1988 (http://www.ornl.gov/hgmis/project/budget.html).

Mitochondrial Genome

[0005] The mitochondrial genome is a compact yet critical sequence of nucleic acid. The mitochondrial genome codes for enzyme subunits necessary for cellular respiration. Mitochondrial DNA, or “mtDNA”, is a minuscule genome of nucleic acid at 16,569 base pairs (bp) Anderson et al., 1981; Andrews et al., 1999) in contrast to the immense nuclear genome of 3.3 billion bp. Its genetic complement is astronomically smaller than that of its nuclear cell mate (0.0005%). However, individual cells carry anywhere from 10³ to 10⁴ mitochondria depending on specific cellular function (Singh and Modica-Napolitano 2002). Communication or chemical signalling, routinely occur between the nuclear and mitochondrial genomes (Sherratt et al., 1997). Moreover, specific nuclear components are responsible for maintenance and integrity of mitochondrial sequence (Croteau et al., 1999). When these nuclear areas are rendered non-functional by nuclear rearrangements indicative of potential disease, then mutations begin to appear in mtDNA sequences. In addition, specific mitochondria may be identified for intracellular destruction by deletions prompted by somatic mutations in the mitochondrial genome. This theoretical mechanism may serve as an indication of impending disease as well. About 3,000 genes are required to make a mitochondrion, with only thirty-seven of these coded by the mitochondrial genome, indicating heavy mitochondrial dependence on nuclear loci (Naviaux, 1997).

[0006] All mitochondrial DNA (mtDNA) genomes in a given individual are identical given the clonal expansion of mitochondria within the ovum, once fertilization has occurred. The essential role of mtDNA is the generation of the cellular fuel, adenosine triphosphate (ATP), which fires cellular metabolism. Significantly, the mitochondrial genome is dependent on seventy nuclear encoded proteins to accomplish the oxidation and reduction reactions necessary to this vital function, in addition to the thirteen polypeptides supplied by the mitochondrial genome (Leonard and Shapira, 1997). Different tissues and organs depend on oxidative phosphorylation to a varied extent. Diseases related to defective oxidative phosphorylation (OXPHOS) appear to be closely linked to mtDNA mutations (Byrne, 1992). Consequently as OXPHOS diminishes due to increased severity of mtDNA mutations, organ specific energetic thresholds are not attained which give rise to a variety of clinical phenotypes. Moreover, mutations in the mitochondrial genome are associated with a variety of chronic, degenerative diseases (Gattermann et al. 1995). It is well known that aging and specific types of pathology can alter, or mutate mtDNA compromising the energy production capacity of the cell. This often results in over-expression of defective mitochondria, and/or the cell supplementing the lack of ATP by becoming more glycolytic (Carew and Huang, 2002); therefore, changes or mutations, in the mitochondrial genome can be used as markers for disease genesis and/or disease progression, when monitored at successive intervals.

[0007] Recently, Fliss et al. (2000) found, in primary tumours from lung and bladder cancer, a high frequency of mtDNA mutations which were predominantly homoplasmic in nature, indicating that the mutant mtDNA was dominant in the malignant cells. Point mutations and deletions would appear to be the non-programmed but unavoidable side effect of oxygen free radical damage to the membrane and genome of mitochondria (Miquel et al. 1992). This theory is plausible because not only is the mitochondrial genome lacking protective histones, but also is vulnerable to oxidative damage being found near the oxygen generating inner mitochondrial membrane. Moreover, as mtDNA has a compact genome and lacks introns, deleterious events are thus likely to affect a coding sequence resulting in a biochemical dysfunction. This dysfunction will further increase cellular oxidative stress which will lead to nuclear as well as mtDNA damage, thereby increasing the potential for a cell to enter into the cancer process (Penta et al., 2001). In this respect, research indicates that with increasing age there is an increase in mtDNA damage (Cortopassi & Wang 1995) and a subsequent decline in respiratory function (Miquel et al. 1992) leading to eventual cell death.

MtDNA as a Diagnostic Tool

[0008] MtDNA sequence dynamics are important diagnostic tools. Mutations in mtDNA are often preliminary indicators of developing disease, often associated with nuclear mutations, and act as biomarkers specifically related to disease, such as but not limited to: tissue damage and cancer from smoking and exposure to second hand tobacco smoke (Lee et al., 1998; Wei, 1998); longevity, based on accumulation of mitochondrial genome mutations beginning around 20 years of age and increasing thereafter (von Wurmb, 1998); metastatic disease caused by mutation or exposure to carcinogens, mutagens, ultraviolet radiation (Birch-Machin, 2000); osteoarthritis; cardiovascular, Alzheimer, Parkinson disease (Shoffner et al., 1993; Sherratt et al., 1997;Zhang et al, 1998); age associated hearing loss (Seidman et al., 1997); optic nerve degeneration and cardiac dysrhythmia (Brown et al., 1997; Wallace et al., 1988); chronic progressive external exophthalmoplegia (Taniike et al., 1992); atherosclerosis (Bogliolo et al., 1999); papillary thyroid carcinomas and thyroid tumours (Yeh et al., 2000); as well as others (e.g. Naviaux, 1997; Chinnery and Tumbull, 1999;).

[0009] Mutations at specific sites of the mitochondrial genome can be associated with certain diseases. For example, mutations at 4216, 4217 and 4917 are associated with Leber's Hereditary Optic Neuropathy (LHON) (Mitochondrial Research Society; Huoponen (2001); MitoMap). A mutation at 15452 was found in 5/5 patients to be associated with ubiquinol cytochrome c reductase (complex III) deficiency (Valnot et al. 1999). However, mutations at these sites were not found to be associated with prostate cancer.

[0010] Specifically, these alterations include point mutations (transitions, transversions), deletions (one base to thousands of bases), inversions, duplications, (one base to thousands of bases), recombinations and insertions (one base to thousands of bases). In addition, specific base pair alterations, deletions, or combinations thereof are associated with early onset of prostate, skin, and lung cancer, as well as aging (e.g. Polyak et al., 1998), premature aging, exposure to carcinogens (Lee et al., 1998), etc.

[0011] Since mtDNA is passed to offspring exclusively through the ovum, it is imperative to understand mitochondrial sequences through this means of inheritance. The sequence of mtDNA varies widely between maternal lineages (Ward et al., 1991), hence mutations associated with disease must be clearly understood in comparison to this variation. For example, a specific T to C transition noted in the sequence of several individuals, associated with a specific cancer, could in reality be natural variation in a maternal lineage widespread in a given particular geographical area or associated with ethnicity. For example, Native North Americans express an unusually high frequency of adult onset diabetes. In addition, all North American Natives are genetically characterized by five basic maternal lineages designated A, B, C, D, and X (Schurr et al., 1990; Stone and Stoneking, 1993; Smith et al., 1999). Lineage A is distinguished by a simple point mutation resulting in a Hae III site at bp 663 in the mitochondrial genome, yet there is no causative relationship between this mutation and the adult onset of diabetes. In addition, even within lineage clusters there is sequence variation.

[0012] Outside of the specific markers associated with a particular lineage there is more intrapopulation variation than interpopulation sequence variation (Easton et al., 1996; Ward et al., 1991, 1993;) This divergence must be understood for optimal identification of disease associated mutations, hence a maternal line study approach (Parsons et al., 1997), mimicking the strengths of a longitudinal design (i.e. subject tracking over a substantial period of time), must be used to identify mutations directly associated with disease, as opposed to mutations without disease association. Moreover, particular substances, such as second hand tobacco smoke, low levels of asbestos, lead, all known mutagens and at low levels in many environments, may be the cause of specific point mutations, but not necessarily a disease specific marker. Hence, a substantial mtDNA sequence database is a clear prerequisite to accurate forecasting of potential disease as a natural process, or through exposure to causative agents. Furthermore, the entire molecule must be sequenced for its full information content. The entire suite of point mutations (transitions, transversions), deletions (one base to thousands of bases), inversions, duplications, (one base to thousands of bases), recombinations and insertions (one base to thousands of bases) must be characterized as a whole over the entire mitochondrial genome. This ensures that all possible information available in the mitochondrial genome is captured. Although the genome of cytoplasmic mitochondria (16,569 bp) has been sequenced at an individual level, like its nuclear counterpart, the mitochondrial genome has not been sequenced at a population level for use as a diagnostic tool.

[0013] Recently mitochondria have been implicated in the carcinogenic process because of their role in apoptosis and other aspects of tumour biology (Green & Reed, 1998, Penta et al., 2001), in particular somatic mutations of mtDNA (mtDNA) have been observed in a number of human tumours (Habano et al. 1998; Polyak et al. 1998; Tamura et al. 1999; Fliss, et al. 2000). These latter findings were made more interesting by the claims that the particular mtDNA mutations appeared to be homoplasmic (Habano et al. 1998; Polyak et al. 1998; Fliss, et al. 2000). Additionally researchers have found that ultraviolet radiation (UV) is important in the development and pathogenesis of non-melanoma skin cancer (NMSC) (Weinstock 1998; Rees, 1998) and UV induces mtDNA damage in human skin (Birch-Machin, 2000a).

[0014] Moreover, through time, mitochondrial sequence loses integrity. For example, the 4977 bp deletion increases in frequency with age (Fahn et al., 1996). Early in life, this deletion begins to occur in small numbers of mitochondria. By age 80, a substantial number of molecules have been deleted. This deletion characterizes the normal aging process, and as such serves as a biomarker for this process. Quantification of this aging process may allow medical or other interventions to slow the process.

[0015] This application of mitochondrial genomics to medicine has been overlooked because mtDNA has been used primarily as a tool in population genetics and more recently in forensics; however, it is becoming increasingly evident that the information content of mtDNA has substantial application in the field of medical diagnostics. Moreover, sequencing the entire complement of mtDNA was a laborious task before the recent advent of high capacity, high-throughput robotic DNA sequencing systems. In addition, population geneticists were able to gather significant data from two highly variable areas in the control region; however, these small regions represent a small portion of the overall genome, less than 10%, meaning that 90% of the discriminating power of the information is left unused! Significantly, many disease associated alterations are outside of the control region. The character of the entire genome should be considered to include all sequence information for accurate and highly discriminating diagnostics.

Non-Melanoma Skin Cancer

[0016] Human non-melanoma skin cancer (NMSC) is the commonest cancer in many Caucasian populations (Weinstock, 1998; Rees, 1998). The majority of these tumours are basal cell carcinoma (BCC) and squamous cell carcinoma (SCC). BCCs are locally invasive and can cause significant morbidity but rarely metastasize. SCCs show significant metastatic potential and the occurrence of multiple NMSCs in patients with immunosuppression causes significant management problems (Rees, 1998). While there are no clinically identified pre-malignant lesions for BCC, some SCCs are thought to arise from precursor lesions, namely actinic keratoses (AKs) or areas of Bowen's disease (in situ carcinoma) (Rees, 1998).

[0017] SCCs show loss of heterozygosity affecting several chromosomes which suggests the involvement of several tumour suppressor genes in their development. Interestingly, in AKs, an equal or greater degree of genetic loss is observed in these precursor lesions compared to SCCs (Rehman et al. 1994; Rehman et al. 1996). This is important for the proposed invention because it suggests that other mechanisms, in addition to inactivation of tumour suppressor genes, are likely to be involved in the development of SCCs.

[0018] A role for mitochondria in tumourigenesis was originally hypothesised when tumour cells were found to have an impaired respiratory system and high glycolytic activity (Shay & Werbin, 1987). Recent findings elucidating the role of mitochondria in apoptosis (Green & Reed, 1998) together with the high incidence of homoplasmic mtDNA mutations in colon cancer (Habano et al. 1998; Polyak et al. 1998, reviewed in Penta et al., 2001), primary tumours of the bladder, neck and lung (Fliss et al. 2000), and gastric tumours (Tamura et al. 1999), further support this hypothesis. Furthermore, it has been proposed that these mitochondrial mutations may affect the levels of reactive oxygen species (ROS) which have been shown to be highly mitogenic (Polyak et al. 1998; Li et al. 1997).

[0019] Previous studies by the inventors and others have shown that mutations in mtDNA and the associated mitochondrial dysfunction is an important contributor to human degenerative diseases (Birch-Machin et al. 1993; Chinnery et al. 1999; Birch-Machin et al. 2000b). This is because the mitochondrial genome is particularly susceptible to mutations due to the high amounts of ROS produced in this organelle coupled with the lack of protective histones and a low rate of mtDNA repair (Pascucci et al. 1997; Sawyer & van Houten; LeDoux et al. 1999) compared to the nucleus. Indeed, the mutation rate for mtDNA is around ten times higher than that of nuclear DNA (Wallace, 1994). Most of the mtDNA mutations identified in the recent human tumour studies have indicated possible exposure to ROS derived mutagens. This is important for the investigation of mtDNA mutations in NMSC because there is recent evidence for the direct involvement of UV induced ROS in the generation of mtDNA deletions in human skin cells (Berneburg et al. 1999, Lowes et al., 2002). In addition, the major determinant of NMSC in individuals without protective pigmentation or genetic predisposition is UV (Weinstock, 1998). The putative precursor lesions of SCCs are also found predominantly on constant sun-exposed sites. This is important because work by the Birch-Machin laboratory has shown distinct differences between the incidence of mitochondrial DNA damage in skin taken from different sun-exposed body sites. The vast majority of the damage is found on constant sun-exposed sites (Krishanan et al., 2002).

[0020] One of the inventors was the first to quantitatively show that UV exposure induces mtDNA damage (Birch-Machin et al. 1998). MtDNA as a molecular marker was used to study the relation between chronological aging and photo aging in human skin. A 3-primer quantitative PCR method was used to study the changes in the ratio of the 4977 bp-deleted to wild type mtDNA in relation to sun exposure and chronological age of human skin. There was a significant increase in the incidence of high levels (i.e. >I %) of the 4977 bp-deleted mtDNA in sun-exposed (27%, [ 27/100]) compared with sun-protected sites (1.1% [ 1/90]) (Fishers exact test, P<0.0001). Deletions or mutations of mtDNA may therefore be useful as a marker of cumulative ultraviolet radiation exposure.

[0021] Furthermore, a study using a South-Western Blot approach involving monoclonal antibodies against thymine dimers, provided direct evidence for the presence of UV-induced damage in purified mtDNA (Ray et al. 1998).

[0022] Quantification of a single deletion alone, however, may not provide a reliable UV bio-marker because it represents one of many possible deletions or combinations and other associated mutations (Birch-Machin, 2000). Recent work from the inventors' research group has used a long extension PCR (LX-PCR) technique to amplify the entire mitochondrial genome in order to determine the whole deletion spectrum of mtDNA secondary to UV exposure (Ray et al. 2000). Long PCR analysis of 71 split skin samples, where the epidermis is separated from the underlying dermis, was performed in relation to sun exposure. There was a significant increase in the number of deletions with increasing UV exposure in the epidermis (Kruskal-Wallis test, p=0.0015). The findings in the epidermis are not confounded by any age-dependent increases in mtDNA deletions also detected by the long PCR technique. The large spectrum of identified deletions highlights the ubiquitous nature and the high mutational load of mtDNA associated with UV exposure. Compared to the detection of single deletions using competitive PCR, the study shows that long PCR is a sensitive technique and may therefore provide a more comprehensive, although not quantitative, index of overall mtDNA damage in skin. The studies by one of the inventors described above clearly show that mtDNA is a significant target of UV and this together with the role of mitochondrial in skin disease has been recently reviewed (Birch-Machin, 2000).

[0023] The pigmentation of human hair and skin which is the major co-variant of UV sensitivity and human skin cancer has been investigated. These investigations have centred on the association of variants of the melanocortin 1-receptor gene and sun-sensitivity of individuals and populations (Smith et al. 1998; Healy et al. 1999; Flanagan et al. 2000; Healy et al. 2000; Harding et al. 2000; Flanagan et al., 2002) relating to skin cancer susceptibility. However, these studies have not addressed population-level variation in mtDNA sequences in association with particular skin types and/or hair colour.

[0024] One of the questions which remains largely unanswered by the recent studies of mtDNA mutations in human tumours is the incidence of deletions of the mitochondrial genome in relationship to these tumours. This is an important question to answer because a preliminary study of a single patient in human skin has shown differences in the incidence of the common mtDNA deletion between several tumours (AKs and SCCs) and normal skin (Pang et al. 1994). As well, the inventors' own preliminary data shows an increased number of mtDNA deletions in tumours compared to normal skin. Finally, Birch-Machin and others have shown that the incidence of mtDNA deletions, as well as duplications, increases with increasing UV exposure (Berneburg et al. 1999; Birch-Machin et al. 1998; Ray et al. 1998; Ray et al. 1999; Ray et al. 2000), Lindsey et al., 2001; Birch-Machin et al., 2001; Lowes et al., 2002, Krishnan et al., 2002).

[0025] Apart from the questions relating to tumour progression other vital questions remain largely unanswered by the recent studies of mtDNA in human tumours (Habano et al. 1998; Fiiss et al. 2000). Firstly, due to technical limitations, it is not clear whether the mtDNA mutations are truly homoplasmic, as varying levels of heteroplasmy may indicate important disease transitions as well (Habano et al. 1998; Polyak et al. 1998; Fliss, et al. 2000); secondly, apart from one study (Tamura et al. 1999) the incidence of mtDNA deletions and their role as potential biomarkers for NMSC was not investigated. Researchers have looked at the common deletion and ignored the rest of the 100 or so deletions. As well, investigators have been focused on identification of mutations, rather than their quantification. It is important to assess accurately in a quantitative manner the incidence of deletions because of the threshold effect of mtDNA damage on ATP production and consequently cell function. In addition, deletions are difficult to characterize. Long PCR is typically used which produces a ladder of deletions which then have to be characterized.

[0026] Current diagnosis of NMSC is pathological evaluation of excised tissue. Accordingly, there is a need for an early marker of UV-induced DNA damage which predisposes an individual to NMSC. There is also a need for a genetic-based diagnostic tool which allows for early detection and is diagnostically accurate.

Prostate Cancer

[0027] Prostate cancer is a frequently diagnosed solid tumour that most likely originates in the prostate epithelium (Huang et al. 1999). In 1997, nearly 10 million American men were screened for prostate specific antigen (PSA), which at increased levels is indicative of prostate cancer (Woodwell, 1999). An even greater number of men are screened by an initial digital rectal exam (DRE). In the same year, 31 million men had a DRE (Woodwell, 1999). Moreover, the annual number of newly diagnosed cases of prostate cancer in the United States is estimated at 179,000 (Landis et al., 1999). It is the second most commonly diagnosed cancer and second leading cause of cancer mortality in Canadian men. In 1997 prostate cancer accounted for 19,800 of newly diagnosed cancers in Canadian men (28%) (National Cancer Institute of Canada). It is estimated that 30% to 40% of all men over the age of forty-nine (49) have some cancerous prostate cells, yet only 20% to 25% of these men have a clinically significant form of prostate cancer (SpringNet—CE Connection, internet, www.springnet.com/ce/j803a.htm). Prostate cancer exhibits a wide variety of histological behaviour involving both erogenous and exogenous factors, i.e. socio-economic situations, diet, geography, hormonal imbalance, family history and genetic constitution (Konishi et al. 1997; Hayward et al. 1998).

[0028] From a risk standpoint familial and hereditary prostate cancers are not considered synonymous terms. Familial cancers refer to the incidences within a family, but are not inherited. This form accounts for up to 25% of prostate cancers (Walsh & Partin, 1997). Hereditary refers to a subtype of prostate cancer with a Mendelian inheritance of a predisposing gene(s) and accounts for approximately 9% of reported cases. A positive family history of prostate cancer for this disease suggests that these predisposing gene(s) play an important role in prostate cancer development and progression. Recently, susceptibility genes on chromosomes 1 and X have been identified as predisposing men to prostate cancer, providing greater insight into the etiology of hereditary cancer (Berthon et a]. 1998; Xu et al. 1998).

[0029] Prostate cancer prognosis mainly depends on the tumour stage and grade at diagnosis. Only localized prostate cancer can be cured by radical treatment. Standard detection still relies on digital rectal examination, PSA testing and histopathologic examination of prostatic biopsied tissues. Biopsy of a mass is used to confirm malignancy, it is not an early detection technique. Unfortunately, some early tumours are impossible to identify during rectal exams. PSA tests have a specificity of 60 to 70% and a sensitivity of 70 to 80% (personal communication, Dr. Sunil Gulavita, Northwestern Ontario Cancer Centre). A newer technique which refines diagnosis for tumours of common histologic grade is ploidy-DNA analysis employing flow cytometry (Shankey et al. 1995); however, this technique measures chromosomal changes that are only apparent in later stages of cancer development and is not sufficiently sensitive for the detection of minor alterations in DNA structure or chromosomal inversions, or reciprocal trans-locations in early cancers. The invention focuses on early detection since prognosis is heavily dependent on the stage of disease at diagnosis.

[0030] Our understanding of genetic abnormalities in prostate cancers is scanty. Research into prostate cancer has focussed on the development of knowledge in the following areas: 1) proto-oncogenes (Buttyan et al. 1987); 2) tumour suppressor genes (p53, p73, KAI1 and MMACI/PTEN; Dong et al. 1995; Cairns et al. 1997) and 3) telomere/telomerase activity in metastasis. Up-regulation of telomerase and amplification of telomeric DNA in prostate cells may provide effective markers for diagnosis. Moreover, telomeres may serve as a site for therapy (Ozen et al. 1998). A number of groups have provided evidence for a “prostate cancer gene” in the short arm of chromosome 1 (Berthon et al. 1998). More work is needed to identify the specific locus within this region. It has been suggested that this marker is only one of several possible genes predisposing men to familial prostate cancer. Other studies have shown possible marker loci on the X chromosome (Xu et al. 1998). If some prostate cancers are polygenic, then mtDNA becomes an important diagnostic tool since it may be difficult to identify and understand the interplay between all associated nuclear genes in such cases.

[0031] Certainly, a key issue in prostate cancer research is to identify molecular markers that can effectively determine and distinguish tumour progression. Molecular markers may be able to discriminate between those cases of prostate neoplasmy which will proceed rapidly to metastatic disease and those with little chance of resulting in tumour development. Comparison of molecular markers or mutations can determine whether the tumour pathway is latent or aggressive. Up to the present research has focused primarily on the secrets hidden within the nuclear genome; however, the much smaller mtDNA genome seems to act as a barometer for events in the nucleus and as such provides a means for the early detection of human prostate cancer (Zeviani et al. 1990). Importantly, in this respect, mitochondria have been implicated in the carcinogenic process because of their role in apoptosis and other aspects of tumour biology (Green & Reed 1998). In particular, somatic mutations of mtDNA have been observed in a number of human tumours (Polyak et al. 1998, Tamura et al. 1999, Fliss et al. 2000). However, previous studies have been exclusively cross-sectional as they have not considered the clonal nature of mtDNA in maternal lines. These limited cross-sectional studies merely show the mutation at one time point. This may or may not give an accurate link between a mutation and the corresponding disease state. Cross-sectional studies employing a maternal line have the advantage of tracking a mutation in mtDNA over time and thus mimic the strength of a longitudinal design. Mutations which are common population variants, as opposed to mutations associated with disease, can both be identified.

Aging

[0032] Aging consists of an accumulation of changes with time both at the molecular and cellular levels; however, the specific molecular mechanisms underlying the aging process remain to be elucidated. In an attempt to explain the aging process, mitochondrial genomes in older subjects are compared to the genomes of younger subjects from the same maternal lineage. One deletion associated with aging is known as the common deletion, or 4977-bp deletion. Aging research has been limited to this common deletion and polymorphisms in the control region. For a clear understanding of these mutations, the entire genome must be analyzed. Other deletions are seen in Table 1 adapted from Wei, 1992.

TABLE 1

| Deletions | |
|---|---|
| size (bp) | References |
| 4977 | Cortopassi and Arnheim, 1990; |
| | Ikebe et al., 1990; Linnane et al., 1990; |
| | Corral-Debrinski et al., 1991; Yen et al., 1991; |
| | Torii et al., 1992; Zhang et al., 1992 |
| 7436 | Corral-Debrinski et al., 1991; |
| | Hattori et al., 1991 |
| | Hsieh and Wei, 1992 |
| 3610 | Katayama et al., 1991 |
| 6063 | Hsieh and Wei, 1992 |
| | Yen et al., 1992 |
| 5827 | Zhang et al., 1992 |
| 6335 | Zhang et al., 1992 |
| 7635 | Zhang et al., 1992 |
| 7737 | Zhang et al., 1992 |
| 7856 | Zhang et al., 1992 |
| 8041 | Zhang et al., 1992 |
| 8044 | Zhang et al., 1992 |
| 5756 | Zhang et al., 1992 |

[0033] Oxygen free radicals, a normal by product of ATP production, are a probable cause of this deletion, which increases in frequency with age. Existing literature demonstrates a strong association between mtDNA (mtDNA) mutations, chronological age, and the overall aging process in postmitotic tissues such as muscle and brain; however, comparative maternal line studies are needed to discriminate between aging assiociated mutational events and those mutations without an aging association.

[0034] In recent years a variety of chronic degenerative diseases have been shown to result from mutations in mtDNA (Gatterman et al. 1995). Diseases related to defective OXPHOS appear to be mutations in mtDNA mutations (Byrne, 1992). Furthermore, it has been shown that these myopathies are often associated with the common deletion of 4977-bp of the mitochondrial genome (Liu et al. 1997). This large deletion has also been found, at heteroplasmic levels, in various tissues of normal aging persons and is consistent with the Mitochondrial Theory of Aging (Harman, 1981). This is manifest through an increase in the deletion frequency (Cortopassi & Wang, 1995) and a subsequent decline in respiratory function (Miquel et al. 1992) resulting in eventual cell death in old age. The early detection of a predisposition to a disease or disorder presents the best opportunity for medical intervention, as early genetic diagnosis may improve the prognosis for a patient.

[0035] Previous studies employing a cross-sectional design have established an association or cause and effect relationship between mtDNA mutations, deletions, and/or combinations of such and aging; however, in order to obtain accurate data the age specific deletion and/or mutation rate must be determined concisely. Attributing mutations to the aging process as opposed to a particular disease at the population level is vital. This information is imperative to an understanding of how mtDNA damage accrues over time. Moreover, the consequences of these particular mutations, their frequencies, and associations in the temporal aspects of aging must be known in order to forecast and eventually slow aging at the molecular level. Researchers have not yet determined this rate, which requires evaluation of population data through maternal lines. Accordingly, there is a need for a biomarker which tracks the aging process.

[0036] Accordingly, there is a need for a simple, straightforward system of monitoring the mitochondrial genome for mutations which indicate early stage cancer, aging or other human diseases with a DNA component. There is also a need for a simple diagnostic system for non-melanoma skin cancer, prostate cancer, lung cancer and aging linked to defects in the mitochondrial genome. There is a need for a diagnostic system which differentiates between mutations in mtDNA which cause disease, and those which simply represent variation within and between populations.

### SUMMARY OF THE INVENTION

[0037] An object of the present invention is to provide a simple, straightforward system for monitoring the mitochondrial genome for early transitions associated with cancer, aging, and other human diseases with a DNA component.

[0038] In an embodiment of the present invention a small biological sample which includes tissue or fluid samples such as urine, prostate fluid, skin cells, or saliva is taken from an individual. These samples are examined, using any suitable method including histological examination, to identify cells demonstrating disease morphology. Using any suitable method, including without limitation; laser capture, microdissected cells demonstrating disease morphology are recovered from the sample and the mtDNA therefrom is sequenced, followed by comparison to a database of known mitochondrial sequences associated with both health and disease.

[0039] In a preferred embodiment, the entire mitochondrial genome is sequenced at a population level to determine the variation of mtDNA sequences associated with disease.

[0040] In an additional embodiment, the presence of mutation progression may signal the beginning and continuing development of disease. Mutation load may also indicate progression or disease state.

[0041] In a preferred embodiment, mtDNA sequences from prostate massage fluid are compared to a mtDNA sequence database of normal, transitory, and metastatic mtDNA sequences clearly associated with prostate cancer. This comparative data set is based on studies of maternal lines, and other normal maternal line variation present in the population stored in a maternal line database affording a lucid picture of mtDNA mutations clearly associated with disease, as opposed to variation present in mitochondrial lineages existing in the general population.

[0042] There may be specific maternal lineages which indicate a predisposition to disease.

[0043] In another embodiment, mtDNA sequences from suspected non-melanoma skin cancers are compared to a mtDNA sequence database of normal and mtDNA sequences clearly associated with non-melanoma skin cancer.

[0044] According to an aspect of the present invention, there is provided a method of detecting in a subject containing mtDNA the genesis or progression of disease comprising obtaining a biological sample from the subject, extracting DNA from the biological sample, and detecting the presence of mutations in the mtDNA. The step of detecting the presence of mutations is chosen from sequencing the mtDNA, amplifying the mtDNA by PCR, South-Western blotting, denaturing HPLC, hybridization to microarrays, gene chips or biochips, molecular marker analysis or combinations thereof. Further, the mtDNA of the biological sample is compared to a database, the database containing data of mutations associated with the mtDNA sequences of non-disease and disease associated mitochondrial genomes.

[0045] According to an aspect of the present invention, there is provided a method of detecting in a human subject the presence of a disease comprising obtaining a biological sample from the human subject, extracting DNA from the biological sample, detecting mutations in the mitochondrial DNA of the biological sample, and comparing the mitochondrial DNA sequence of the biological sample to a database, the database containing data of mutations associated with the mitochondrial DNA sequences of non-disease and disease associated mitochondrial genomes Mutation rates of mitochondria DNA associated with a specific disease may be an important indicator of disease development and prognosis. This may allow specific identification of disease stage, improving disease definition resulting in better disease intervention and specific therapy application.

[0046] In yet another embodiment, increasing the sensitivity for heteroplasmy detection increases the early identification capacity of the test.

[0047] In addition, the invention may be used to monitor the progression of disease by watching important sites targeted by metastasis.

[0048] According to another aspect of the present invention, there is provided a method of determining a predisposition to a disease or disorder indicated by mutations in a mitochondrial DNA sequence comprising: obtaining a biological sample from the human subject, extracting DNA from the biological sample, detecting mutations in the mitochondrial DNA of the biological sample, and comparing the mitochondrial DNA sequence of the biological sample to a database, the database containing data of mutations associated with the mitochondrial DNA sequences of individuals who are predisposed to the disease or disorder, and individuals who are not predisposed to the disease or disorder.

[0049] In a preferred embodiment, a DNA microarray is used in determining the sequence of the mitochondrial DNA. Other technologies can also be used. For example, direct sequencing of a subset, or the complete human genome, SNaP shot™, SNP detection, real time PCR or other methods as is standard in the art.

[0050] According to a further aspect of the present invention, there is provided a method for assessing the status of the aging process of a human subject comprising obtaining a biological sample from the human subject, extracting DNA from the biological sample, detecting mutations in the mitochondrial DNA of the biological sample, and comparing the mitochondrial DNA sequence of the biological sample to a database, the database containing data of mutations of TDNA associated with aging.

[0051] The step of detecting the presence of mutations in the mtDNA can be selected from: sequencing the mtDNA, amplifying mtDNA by PCR, Southern, Northern, Western, South-Western blot hybridizations, denaturing HPLC, hybridization to microarrays, biochips or gene chips, molecular marker analysis, biosensors, melting temperature profiling or a combination of any of the above.

[0052] According to yet another aspect of the present invention, there is provided a database containing a plurality of human mitochondrial DNA sequences, the mitochondrial DNA sequences selected from the group of normal control sequences associated with non-disease states, sequences associated with the presence of disease or sequences indicative of the predisposition to disease.

[0053] According to yet another aspect of the present invention, there is provided a kit for diagnosis of a disease comprising a disposable chip, microarray, means for holding the disposable chip, means for extraction of mitochondrial DNA and means for access to a database of mitochondrial DNA sequences.

[0054] According to yet another aspect of the present invention there is provided a method of diagnosing a disease in a patient comprising hybridizing a nucleic acid sample obtained from mitochondrial DNA to an array comprising a solid substrate and a plurality of nucleic acid members, wherein each member is indicative of the presence of a disease, wherein each nucleic acid member has a unique position and is stably associated with the solid substrate, and wherein hybridization of said nucleic acid sample to one or more nucleic acid members comprising said array is indicative of the presence of prostate cancer.

[0055] According to yet another aspect of the present invention there is provided a kit for determining predisposition to a disease comprising a disposable chip, microarray, means for holding the disposable chip, means for extraction of DNA and means for access to a database of mitochondrial DNA sequences.

[0056] According to another aspect of the present invention, there is provided a method of determining a predisposition to or developing symptoms of a disease or disorder indicated by mutations in a mitochondrial DNA sequence comprising obtaining a biological sample from the human subject, extracting mitochondrial DNA from the biological sample, sequencing the mitochondrial DNA of the biological sample, and comparing the mitochondrial DNA sequence of the biological sample to a database, the database containing population-level data of mutations associated with the mtDNA sequences of non-disease and disease associated mitochondrial genomes.

[0057] According to yet another aspect of the present invention, there is provided a method of diagnosing non-melanoma skin cancer in a patient comprising: hybridizing a nucleic acid sample obtained from mitochondrial DNA to an array comprising a solid substrate and a plurality of nucleic acid members, wherein each member is indicative of non-melanoma cancer, wherein each nucleic acid member has a unique position and is stably associated with the solid substrate, and wherein hybridization of said nucleic acid sample to one or more nucleic acid members comprising said array is indicative of the presence of non-melanoma skin cancer. Alternatively, non-specific mutations may reach a threshold effect beyond which cancer develops. In a similar manner, prostate cancer can also be diagnosed.

[0058] According to another aspect of the present invention, there is provided a method of detecting heteroplasmy in a subject containing mtDNA comprising obtaining a biological sample from the subject; extracting DNA from the biological sample; and performing denaturing HPLC on the sample.

[0059] According to another aspect of the present invention, there is provided a method of detecting mutations associated with disease in a subject containing mtDNA comprising: obtaining a biological sample from the subject, extracting DNA from the biological sample, detecting the presence of mutations in the mtDNA, and comparing the mtDNA of the biological sample to a database, the database containing data of common population variants in non-disease and disease associated mitochondrial genomes.

[0060] Another aspect of the invention is to provide a use of any one or any combination of the mutations, substitutions, deletions or insertions listed on Table 4 or SEQ ID NOs: 102 to 138 to detect a predisposition to a disease or disorder, early detection of a disease or a disorder, genesis of a disease or a disorder, presence of a disease or a disorder, progression of a disease or a disorder, or aging in a subject having mtDNA.

[0061] Another aspect of the invention is to provide a method of detecting mutations associated with a disease, a disorder or aging in a subject having mtDNA, comprising: providing a biological sample from the subject, wherein the biological sample is chosen from non-involved tissue, distant benign tissue, adjacent benign tissue, atypical tissue, histologically abnormal tissue, and diseased tissue; extracting DNA from the biological sample; detecting the presence of mutations in the mtDNA; and determining whether the mutations are associated with normal interpopulation or intrapopulation variations, or whether the mutations are associated with the disease, the disorder or aging. Optionally, the method further comprises at least one of determining total mutation load in the mtDNA of the biological sample; and determining the identity of the mutation in the mtDNA of the biological sample. The step of determining whether the mutations are associated with normal interpopulation or intrapopulation variations, or whether the mutations are associated with the disease, the disorder or aging may comprise at least one of: comparing the mtDNA of the biological sample to a database, the database containing data of interpopulation and intrapopulation variations, and mutations associated with the disease, the disorder or aging; and determining total mutation load of the biological sample.

[0062] The diagnosis may be chosen from predisposition to a disease or a disorder, early detection of a disease or a disorder, genesis of a disease or a disorder, presence of a disease or a disorder, and progression of a disease or a disorder. The step of detecting the presence of mutations may be chosen from: sequencing the mtDNA; amplifying mtDNA by PCR; Southern, Northern, Western and South-Western blot hybridizations; denaturing HPLC; hybridization to microarrays, gene chips or biochips; molecular marker analysis; and a combination of any of the above.

[0063] The disease may be non-melanoma skin cancer or prostate cancer. The database contains at least a statistically significant number of mitochondrial DNA sequences, the mitochondrial DNA sequences having been obtained from a maternal line, a non-maternal line, or both.

[0064] Another aspect of the invention is to provide an array comprising a plurality of nucleic acid members, and a solid substrate, wherein the nucleic acid members are associated with the mutations listed on Table 4 or SEQ ID Nos: 102 to 138 and are indicative of the presence or predisposition of a disease, a disorder or aging, or used to determine a prohibiting index by quantifying the proportion of base pair deletions and mutations associated with a disease, a disorder or aging, and is chosen from mitochondrial DNA, RNA transcribed from mitochondrial DNA, and cDNA, wherein each nucleic acid member has a unique position on said array and is stably associated with the solid substrate. For example, the members may be associated with prostate cancer or any other disease or disorder.

[0065] Another aspect of the invention is to provide a kit for diagnosing, determining a predisposition, or early detection of a disease comprising a disposable chip, the array described above, means for holding the disposable chip, means for extraction of mitochondrial DNA and means for access to a database of mitochondrial DNA sequences. For example, the member may be associated with prostate cancer.

[0066] Another aspect of the invention is to provide a database containing a plurality of human mitochondrial DNA sequences, the mitochondrial DNA sequences are chosen from normal control sequences associated with non-disease states, sequences associated with interpopulation variations, sequences associated with intrapopulation variations, and sequences associated with the mutations on Table 4 or SEQ ID Nos: 102 to 138.

[0067] Another aspect of the invention, is a method of monitoring a person for the presence of pre-neoplasia, neoplasia or progression of neoplasia toward potential malignancy, in a biological sample, comprising (a) providing a biological sample from the subject, (b) extracting DNA from the biological sample, (c) detecting the presence of mutations in the mtDNA, (d) determining whether the mutations are associated with normal interpopulation or intrapopulation variations, or whether the mutations are associated with pre-neoplasia, neoplasia or progression of neoplasia toward potential malignancy, and (e) repeating steps (a) through (d). The step of determining whether the mutations are associated with pre-neoplasia, neoplasia or progression of neoplasia may be done by comparing the mutations with DNA from non-involved tissue or bodily fluid from the subject, or by comparing the mutations with mitochondrial DNA from a maternal relative. The progression of neoplasia may comprise monitoring the person at successive time periods for an increase in mutations or an increase in mutated mitochondrial genomes.

[0068] Another aspect of the invention, is a method of determining whether pre-neoplasia, neoplasia, or malignancy is latent or aggressive in its growth pattern, in a biological sample, comprising (a) providing a biological sample from the subject, (b) extracting DNA from the biological sample, (c) detecting the presence of mutations in the mtDNA, (d) determining whether the mutations are associated with normal interpopulation or intrapopulation variations, or whether the mutations are associated with pre-neoplasia, neoplasia or progression of neoplasia toward potential malignancy, and (e) repeating steps (a) through (d). The step of determining whether the mutations are associated with pre-neoplasia, neoplasia or progression of neoplasia may be done by comparing the mutations with DNA from non-involved tissue or bodily fluid from the subject, or by comparing the mutations with mitochondrial DNA from a maternal relative. The determination of whether the malignancy is latent or aggressive may comprise monitoring the person at successive time periods for an increase in mutations or an increase in mutated mitochondrial genomes.

[0069] Although specific mutation sites may indicate a disease state, a disorder or aging, the total mutation load is also important in determining the genesis, presence and progression of a disease, a disorder or aging. Accordingly, mutation load can be used to diagnose a disease, a disorder or aging.

[0070] The biological sample for the methods of the present invention may be taken from a tissue that is chosen from benign tissue, normal tissue, atypical tissue and histologically/pathologically abnormal tissue. Other clinical methods can also identify abnormal tissue. In addition, the sample may be taken from any bodily fluid, for example, blood, urine, prostate massage fluid, etc.

[0071] The step of determining whether the mutations are associated with normal interpopulation or intrapopulation variations, or whether the mutations are associated with pre-neoplasia, neoplasia, progression of neoplasia toward potential malignancy, or malignancy comprises comparing the mtDNA of the biological sample to a database of sequences associated with pre-neoplasia, neoplasia, progression of neoplasia toward potential malignancy, malignancy, inter and intra population variations and normal sequences. Optionally, one can determine total mutation load of the biological sample. Optionally, the step of determining whether the mutations are associated with pre-neoplasia, neoplasia or progression of neoplasia may be done by comparing the mutations mitochondrial DNA from non-involved tissue or bodily fluid from the subject, or by comparing the mutations with mitochondrial DNA from a maternal relative. The entire mitochondrial genome, or a subset of the genome, can be monitored for mutations which are then compared to the database to aid in the detection of pre-neoplasia, and/or neoplasia, progression towards malignancy and malignancy.

[0072] Another aspect of the invention is to provide oligonucleotide primers chosen from SEQ ID NO. 19 to 101. In still another embodiment of the invention, an oligonucleotide primer is provided which comprises a sequence of 10, 12, 14, 16, 18, 20, 22, 24, 26, or 30 contiguous nucleotides comprised of sequences from human mtDNA.

[0073] The methods, arrays and kits may comprise the mutations listed in Table 4 or SEQ ID Nos: 102 to 138.

[0074] Another aspect of the invention is provide a use of a primer to amplify a nucleic acid molecule comprising at least one mutation listed in Table 4 or SEQ ID Nos: 102 to 138. The primer may be selected from SEQ ID Nos: 19 to 101.

[0075] Another aspect of the invention is to provide a method of detecting at least one mutation listed in Table 4 or SEQ ID Ns: 102 to 138 in a nucleic acid molecule, comprising: amplifying the nucleic acid molecule with a primer associated with the mutation; and detecting the mutation. The primer may be selected from SEQ ID Nos: 19 to 101.

[0076] Another aspect of the present invention is to provide a use of a synonymous or non-synonymous mutation in an ND1 nucleic acid molecule of mtDNA, to detect a predisposition to prostate cancer, early detection of prostate cancer, genesis of prostate cancer, presence of prostate cancer, or progression of prostate cancer in a subject having mtDNA.

[0077] Another aspect of the present invention is to provide a use of a synonymous or non-synonymous mutation in an ND2 nucleic acid molecule of mtDNA, to detect a predisposition to prostate cancer, early detection of prostate cancer, genesis of prostate cancer, presence of prostate cancer, or progression of prostate cancer in a subject having mtDNA.

[0078] Another aspect of the present invention is to provide a use of a synonymous or non-synonymous mutation in a COX1 nucleic acid molecule of mtDNA, to detect a predisposition to prostate cancer, early detection of prostate cancer, genesis of prostate cancer, presence of prostate cancer, or progression of prostate cancer in a subject having mtDNA.

[0079] Another aspect of the present invention is to provide a use of a synonymous or non-synonymous mutation in a CytB nucleic acid molecule of mtDNA, to detect a predisposition to prostate cancer, early detection of prostate cancer, genesis of prostate cancer, presence of prostate cancer, or progression of prostate cancer in a subject having mtDNA.

[0080] The use of the synonymous or non-synonymous mutation of the above can be detected in malignant tissue, adjacent benign tissue, or distant benign tissue in a subject having prostate cancer or progressing toward prostate cancer.

[0081] Another aspect of the invention is to provide a method of detecting a mutation associated with prostate cancer in a subject having mtDNA, comprising: (a) providing a biological sample from the subject, wherein the biological sample is chosen from non-involved tissue, distant benign tissue, adjacent benign tissue, atypical tissue, histologically abnormal tissue, and malignant tissue; (b) extracting DNA from the biological sample; (c) detecting the presence of the mutation in ND1, ND2, COX1 or CytB of mtDNA; and (d) determining whether the mutation is associated with normal interpopulation or intrapopulation variations, or whether the mutation is associated with prostate cancer. The method may further comprise at least one of (i) determining total mutation load in the mtDNA of the biological sample; and (ii) determining the identity of the mutation in the mtDNA of the biological sample. The step of determining whether the mutation is associated with normal interpopulation or intrapopulation variations, or whether the mutation is associated with prostate cancer, may comprises at least one of: (A) comparing the mtDNA of the biological sample to a database, the database containing data of interpopulation and intrapopulation variations, and mutations associated with prostate cancer; and (B) determining total mutation load of the biological sample. The method may be used in a diagnosis, wherein the diagnosis is chosen from predisposition to prostate cancer, early detection of prostate cancer, genesis of prostate cancer, presence of prostate cancer, and progression of prostate cancer.

[0082] The step of detecting the presence of mutations may be chosen from sequencing the mtDNA, amplifying mtDNA by PCR, Southern, Northern, Western and South-Western blot hybridizations, denaturing HPLC, hybridization to microarrays, gene chips or biochips, molecular marker analysis, and a combination of any of the above. The mitochondrial DNA which is sequenced may comprise the entire mitochondrial genome. The mutation may be a synonymous or non-synonymous mutation. Finally, the mutation may be heteroplasmic at any level.

[0083] Another aspect of the invention is to provide an array comprising a plurality of nucleic acid members, and a solid substrate, wherein each of the nucleic acid members is associated with at least one mutation in ND1, ND2, COX1 or CytB of the mitochondrial genome and is indicative of the presence of prostate cancer, and is chosen from mitochondrial DNA, RNA transcribed from mitochondrial DNA, and cDNA, wherein each nucleic acid member has a unique position on said array and is stably associated with the solid substrate.

[0084] Another aspect of the invention is to provide an array comprising a plurality of nucleic acid members, and a solid substrate, wherein each of the nucleic acid members is associated with at least one mutation in ND1, ND2, COX1 or CytB of the mitochondrial genome and is indicative of the progression toward prostate cancer, and is chosen from mitochondrial DNA, RNA transcribed from mitochondrial DNA, and CDNA, wherein each nucleic acid member has a unique position on said array and is stably associated with the solid substrate.

[0085] Another aspect of the invention is to provide a kit for diagnosing prostate cancer comprising a disposable chip, the array described above, means for holding the disposable chip, means for extraction of mitochondrial DNA and means for access to a database of mitochondrial DNA sequences.

[0086] Another aspect of the invention is to provide a kit for determining the progression toward prostate cancer or early detection of prostate cancer comprising a disposable chip, the array described above, means for holding the disposable chip, means for extraction of mitochondrial DNA and means for access to a database of mitochondrial DNA sequences.

[0087] Another aspect of the invention is to provide a database containing mitochondrial DNA sequences for ND1, ND2, COX1 and CytB, the sequences are chosen from normal control sequences associated with non-disease states, sequences associated with interpopulation variations, sequences associated with intrapopulation variations, and sequences associated with prostate cancer.

[0088] Another aspect of the invention is to provide a method of monitoring a person for the progression toward prostate cancer or progression of prostate cancer, in a biological sample from a subject, comprising, (a) providing a biological sample from the subject; (b) extracting DNA from the biological sample; (c) detecting the presence of mutations in the ND1, ND2, COX1 or CytB genes of the mtDNA; (d) determining whether the mutations are associated with normal interpopulation or intrapopulation variations, or whether the mutations are associated with presence of a predisposition to prostate cancer, progression toward prostate cancer, prostate cancer or progression of prostate cancer, and; (e) repeating steps (a) to (d). The biological sample may be from a tissue that is chosen from normal tissue, distant benign tissue, adjacent benign tissue, diseased tissue and malignant tissue. The step of detecting the presence of mutations in the ND1, ND2, COX1 and CytB genes of mitochondrial DNA may comprise at least one of: (a) comparing the mtDNA of the biological sample to the database described above; (b) comparing the mtDNA of the biological sample to a sample of mtDNA from non-involved tissue or non-involved bodily fluid from the subject; (c) comparing the mtDNA of the biological sample to a sample of mtDNA from a maternal relative of the subject; (d) determining total mutation load of the biological sample; and (e) identifying the mutations. The mutations may be synonymous or non-synonymous. The methods may further comprise monitoring the subject at successive time periods for an increase in mutations in ND1, ND2, COX1 or CytB, or an increase in the number of mitochondrial genomes having mutations in ND1, ND2, COX1 or CytB.

[0089] Another aspect of the invention is to provide an isolated mitochondrial ND1 nucleic acid molecule comprising at least one synonymous or non-synonymous mutation for use in detecting the progression toward prostate cancer or the presence of prostate cancer in a subject.

[0090] Another aspect of the invention is to provide an isolated mitochondrial ND2 nucleic acid molecule comprising at least one synonymous or non-synonymous mutation for use in detecting the progression toward prostate cancer or the presence of prostate cancer in a subject.

[0091] Another aspect of the invention is to provide an isolated mitochondrial COX1 nucleic acid molecule comprising at least one synonymous or non-synonymous mutation for use in detecting the progression toward prostate cancer or the presence of prostate cancer in a subject.

[0092] An aspect of the invention is to provide an isolated mitochondrial CytB nucleic acid molecule comprising at least one synonymous or non-synonymous mutation for use in detecting the progression toward prostate cancer or the presence of prostate cancer in a subject.

### BRIEF DESCRIPTION OF THE FIGURES

[0093] FIG. 1 is a histogram showing the number of mutations at nucleotide position in mitochondrial DNA from patients with prostate cancer.

[0094] FIG. 2 shows the first half of the non-synonymous clusters produced using Hierarchal Clustering Explorer (HCE).

[0095] FIG. 3 shows the second half of the non-synonymous clusters produced using Hierarchal Clustering Explorer (HCE).

[0096] FIG. 4 is a copy of FIG. 3 wherein the important cluster is shaded.

### BRIEF DESCRIPTION OF THE TABLES

[0097] Table 1 is a summary of mutations associated with aging.

[0098] Table 1a is a principal component analysis of mutations in mtDNA of seven protein coding regions in control, distant benign, adjacent benign and malignant tissue.

[0099] Table 1b is a neural network analysis of mutations in mtDNA of seven protein coding regions in control, distant benign, adjacent benign and malignant tissue.

[0100] Table 1c is a summary of the synonymous and non-synonymous mutations found in ND1, ND2, COXI and CYTB regions of the mitochondria of 31 patients having prostate cancer from distant benign, adjacent benign and malignant prostate tissue.

[0101] Table 1d is a Chi square analysis of mutations in mitochondrial DNA in distant benign tissue from malignant glands versus prostate tissue from symptomatic but not malignant subjects.

[0102] Table 2 is a summary of the mean number of deletions is epidermal tumours and adjacent normal tissues.

[0103] Table 3 is summary of the standard method of DHPLC.

[0104] Table 4 is a summary of mitochondrial mutations (including D-loop) from prostate needle biopsies and complete genome mutations from malignant, adjacent and distant benign prostate glands from patients with prostate cancer.

[0105] Table 5 is a list of primers used for complete mitochondrial genome amplification for formalin fixed and normal tissues from blood.

### DETAILED DESCRIPTION OF THE INVENTION

[0106] The method of the present invention can be used to diagnose diseases linked to mtDNA. The method of the present invention provides for analysis of the mitochondrial genome of an individual from a biological sample, for example by amplification of the mitochondrial genome, sequencing a portion of the mitochondrial genome, preferably the entire mitochondrial genome of the individual using any known means. Denaturing high performance liquid chromatography (DHPLC) may also be used to rapidly screen many samples. DHPLC can focus on hotspots of mutations. DHPLC is more sensitive than automated sequencing in terms of detecting mutations, and can even detect 2% heteroplasmy, compared with 20-25% for ordinary sequencing. Methods for detecting lower levels of heteroplasmy (<2%) may also be developed.

[0107] As used herein, the “presence” of a mutation in mtDNA includes heteroplasmic mutations and, therefore, it is contemplated that there may be additionally the presence of some normal mtDNA in a sample in which the mutated DNA is present.

[0108] As used herein, “actinic kerotoses” means proposed precursor epidermal lesion of a squamous cell carcinoma.

[0109] As used herein, “aging” refers to an accumulation of changes with time, both at the molecular and cellular levels.

[0110] As used herein, “alleles” means one of several alternative forms of a given DNA sequence occupying a specific place on a chromosome.

[0111] As used herein, “attaching” or “spotting” refers to a process of depositing a nucleic acid onto a solid substrate to form a nucleic acid array such that the nucleic acid is irreversibly bound to the solid substrate via covalent bonds, hydrogen bonds or ionic interactions.

[0112] As used herein, “atypical” or “abnormal” means cellular appearance which is not normal, but also does not appear to be malignant.

[0113] As used herein, “basal cell carcinoma” means a type of cancer of skin cells.

[0114] As used herein, “benign” means of no danger to health; not recurrent or progressive; not malignant.

[0115] As used herein, “Bowen's disease” means in situ epidermal carcinoma.

[0116] As used herein, “diagnostic” or “diagnosing” means using the presence or absence of a mutation or combination of mutations as a factor in disease diagnosis or management. The detection of the mutation(s) can be a step in the disease state diagnosis.

[0117] As used herein, “disease” includes a disorder or other abnormal physical state.

[0118] As used herein, “disease associated mitochondiral genomes” means genomes containing mutations indicative or otherwise associated with a particular disease.

[0119] As used herein, “database” means an electronic storage system (computer based using standard industry software) which will have the capacity to store and provide retrievable information that will enable researchers to rapidly determine the structure of the nucleotide sequences. The database will also store descriptive information about those individuals who provide the biological samples. This descriptive information will include health status and other pertinent indices which may be correlated to the biological sample.

[0120] As used herein, “deletions” means removal of a region of DNA from a contiguous sequence of nucleic acids, where once a deletion has occurred, the gap is repaired by rejoining of the ends. Deletions can range in size from one base to thousands of bases or larger.

[0121] As used herein, “duplications” means when a specific sequence of DNA is copied and inserted behind or forward of the original copy one or more times or elsewhere in the genome.

[0122] As used herein, “heteroplasmy” is defined by the ratio of mutations in the mitochondrial sequences within one organ or cell. Heteroplasmic mutations are those mutations which occur in some, but not all of the copies of the mitochondrial genome.

[0123] As used herein, “homoplasmy” means all mitochondrial sequences are identical.

[0124] As used herein, “hyper-mutation” means accelerated mutation rate which cannot be explained by normal cellular processes or standard evolutionary principles.

[0125] As used herein, “inversions” refers to when a length of DNA is excised and reinserted in reverse orientation.

[0126] As used herein, “maternal inheritance” means mitochondria which are inherited through the cytoplasm of the ovum.

[0127] As used herein, “maternal line” refers to the clonal sequence of mitochondrial DNA as passed down through successive generations from the mother.

[0128] As used herein, “mitochondria” means a eukaryotic cytoplasmic organelle that generates ATP for cellular processes.

[0129] As used herein, “mutation” encompasses any change in a DNA sequence from the wild type sequence, including without limitation point mutations, transitions, insertions, transversions, translocations, deletions, inversions, duplications, recombinations or combinations thereof.

[0130] As used herein, “mutation load” refers to an increase in mutations in mtDNA which may eventually lead to compromised function of the involved gene or the entire genome or may accumulate in non-coding regions.

[0131] As used herein, “neoplasia” means a pathological process which may result in transformation to malignant status.

[0132] As used herein, “non-involved tissue” means tissue from a part of the body which is not associated with the disease in question.

[0133] As used herein, a “non-synonymous” mutation is a mutation of a polynucleotide which results in a different encoded amino acid.

[0134] As used herein, “normal tissue” means tissue with no visible manifestations of disease as determined by histology.

[0135] As defined herein, a “nucleic acid array” refers to a plurality of unique nucleic acids attached to one surface of a solid support at a density exceeding 20 different nucleic acids/cm² wherein each of the nucleic acids is attached to the surface of the solid support in a non-identical preselected region. In one embodiment, the nucleic acid attached to the surface of the solid support is DNA. In a preferred embodiment, the nucleic acid attached to the surface of the solid support is cDNA. In another preferred embodiment, the nucleic acid attached to the surface of the solid support is cDNA synthesized by polymerase chain reaction (PCR). Preferably, a nucleic acid array according to the invention, comprises nucleic acids of at least 150 nucleotides in length. Preferably, a nucleic acid array comprises nucleic acids of less than 6,000 nucleotides in length. More preferably, a nucleic acid array comprises nucleic acids of less than 500 nucleotides in length. In one embodiment, the array comprises at least 500 different nucleic acids attached to one surface of the solid support. In another embodiment, the array comprises at least 10 different nucleic acids attached to one surface of the solid support. In yet another embodiment, the array comprises at least 10,000 different nucleic acids attached to one surface of the solid support. The term “nucleic acid”, as used herein, is interchangeable with the term “polynucleotide”.

[0136] As used herein, a “nucleic acid target” or “a target nucleic acid” is defined as a nucleic acid capable of binding to a nucleic acid member of complementary sequence through one or more types of chemical bonds, usually through complementary base pairing, usually through hydrogen bond formation. As used herein, a nucleic acid target may include natural (i. e., A, G, C, or T) or modified bases (7-deazaguanosine, inosine, etc.). In addition, the bases in nucleic acid probe may be joined by a linkage other than a phosphodiester bond, so long as it does not interfere with hybridization. Thus, nucleic acid targets may be peptide nucleic acids in which the constituent bases are joined by peptide bonds rather than phosphodiester linkages. Preferably, the nucleic acid targets are derived from human tissue or fluid extracts. More preferably, the nucleic acid targets are single- or double-stranded DNA, RNA, or DNA-RNA hybrids synthesized from human tissue of fluid extracts.

[0137] As used herein, “nucleus” means the most conspicuous organelle in the eucaryotic cell, contains all of the chromasomal DNA.

[0138] As used herein, “PSA Test” means prostate-specific antigen test; an antigen found in blood that may be indicative of cancer of the prostate.

[0139] As used herein, “point mutation” means the change of a single nucleotide in DNA.

[0140] As used herein, “polymorphism” means sequence variation in a population of alleles or mtDNA genomes.

[0141] As used herein, “precursor lesions” means a DNA mutation, or combinations thereof, indicating potential disease association.

[0142] As used herein, “predisposed to a disease” or a “predisposition to a disease” means that individuals are at higher risk for developing the disease or disorder or are at higher risk for early onset of the disease or disorder than the average individual, due to the presence or absence of mutations which are associated with the disease or disorder.

[0143] As used herein, “pre-neoplasia” means indications at the cellular or DNA level that a cell may be on the threshold of becoming neoplastic.

[0144] As used herein, “preselected region”, “predefined region”, or “unique position” refers to a localized area on a substrate which is, was, or is intended to be used for the deposit of a nucleic acid and is otherwise referred to herein in the alternative as a “selected region” or simply a “region.” The preselected region may have any convenient shape, e.g., circular, rectangular, elliptical, wedge-shaped, etc. In some embodiments, a preselected region is smaller than about 1 cm², more preferably less than 1 mm², still more preferably less than 0.5 mm², and in some embodiments about 0.125 to 0.5 mm².

[0145] As used herein, “somatic mutation” means a change in DNA sequence after fertilization.

[0146] As used herein, “solid substrate” or “solid support” refers to a material having a rigid or semi-rigid surface. The terms “substrate” and “support” are used interchangeable herein with the terms “solid substrate” and “solid support”. The solid support may be biological, non-biological, organic, inorganic, or a combination of any of these, existing as particles, strands, precipitates, gels, sheets, tubing, spheres, containers, capillaries, pads, slices, films, plates, slides, etc. Often, the substrate is a silicon or glass surface, (poly)tetrafluoroethylene, (poly)vinylidendifluoride, polystyrene, polycarbonate, a charged membrane, such as nylon 66 or nitrocellulose, or combinations thereof. In a preferred embodiment, the solid support is glass. Preferably, at least one surface of the substrate will be substantially flat. Preferably, the surface of the solid support will contain reactive groups, including, but not limited to, carboxyl, amino, hydroxyl, thiol, or the like. In one embodiment, the surface is optically transparent.

[0147] As used herein, “squamous cell carcinoma” means a type of cancer of skin cells.

[0148] As used herein, “stably associated” refers to a nucleic acid that is irreversibly bound to a solid substrate to form an array via covalent bonds, hydrogen bonds or ionic interactions such that the nucleic acid retains its unique preselected position relative to all other nucleic acids that are stably associated with an array, or to all other preselected regions on the solid substrate under conditions wherein an array is analyzed (i.e., hybridization and scanning).

[0149] A “statistically significant” number of mitochondrial DNA sequences is determined by or through the use of standard chi-square statistical algorithms using or determining observed versus expected scores.

[0150] As used herein, “subtle mutation” means low level of mutation at the threshold of detection.

[0151] As used herein, a “synonymous” mutation is a mutation in a polynucleotide which does not have an affect on the encoded amino acid.

[0152] As used herein, “transitions” means substitution of like nitrogenous bases, pyrimidine to pyrimidine, purine to purine. A mutation in which one pyrimidine is substituted by the other, or in which one purine is substituted by the other.

[0153] As used herein, “transversions” means substitution of unlike nitrogenous bases, purine to pyrimidine, pyrimidine to purine. A mutation in which a purine is substituted or replaced by a pyrimidine or vice versa.

MtDNA and Diagnosis of Specific Diseases

[0154] In an embodiment of the present invention, methods are provided for monitoring aging and diagnosing specific diseases such as prostate cancer and non-melanoma skin cancer through comparisons of mtDNA sequences. Diagnosing diseases such as prostate cancer with mtDNA, rather than nuclear DNA has several advantages. Firstly, mtDNA, a less complex genome, is easily understood at an individual and population level, hence a large mtDNA database with normal and disease associated genomes renders individual diagnosis extremely accurate. Accordingly, variation, in relationship to disease, is understood. Secondly, mtDNA has a 10-fold higher mutation rate than nuclear DNA (Wallace 1992). Nuclear rearrangements, suggestive of preliminary disease, are rapidly communicated to mitochondria, where they appear as somatic mutations. Thirdly, mtDNA has a maternal inheritance pattern, and is essentially clonal in that all mitochondria begin with the same mtDNA sequence, hence variation from this clonal condition is easily detected. Additionally, mtDNA does not show convincing evidence of recombination, thus any alterations in sequence are a somatic event. Any one mitochondrion harboring a mutation(s) is in a sense ‘recessive’ as a consequence of there being many mitochondrial genomes (2-10 copies) per mitochondrion, and many mitochondria per cell (500-2,000). Moreover, mitochondrial genomes can tolerate very high levels (up to 90%) of mitochondria with damaged genomes. This happens through complementation by the remaining wild type mtDNA (Chomyn et al. 1992). However, mutated genomes have a replicative advantage over wild type genomes because they are usually smaller (Hayashi et al. 1991), hence there is clonal expansion of mutated mtDNA (Brierley et al. 1998), suggesting that unlike nuclear genes, there is little or no selection against cells harboring mtDNA mutations. Because of this elevated mutation rate, mutations and/or deletions that appear in mtDNA are maintained through the life span of the cell and may serve as a record of exposures to various mutagens. The integrity of mtDNA is maintained by nuclear repair mechanisms, and a defect at these loci has been suggested to result in an autosomal dominant disorder associated with multiple mitochondrial deletions (Zeviani et al. 1990). Consequently, mtDNA may function as an early warning sentinel of early nuclear events related to a variety of cancers or other diseases. Finally, the mitochondrial genome can be sequenced and monitored for mutations on an individual basis.

[0155] The methods and products of the present invention detect both heteroplasmic as well as homoplasmic mutations. In fact, heteroplasmic mutations may be key to the detection of the early genesis of disease, disorder or aging. In addition, although specific mutation sites may indicate a particular disease state, disorder or aging process, the total mutation load is also important in determining the genesis, presence and progression of a disease, a disorder or aging.

[0156] The present invention allows for the ability to examine benign or normal tissue or bodily fluids to determine the genesis of disease, disorder or aging. For example, the present invention allows for the ability to examine benign tissue or bodily fluids for the presence of pre-neoplasia, neoplasia, progression toward malignancy and malignancy.

[0157] The mitochondrial mutations detected by the methods of the invention are compared to inter and intrapopulation variations in mitochondrial DNA, and may include comparison with mitochondrial DNA from non-involved tissue from the subject, or with mitochondrial DNA from a maternal relative. It is not necessary to analyze the entire mitochondrial genome. For example, it is not necessary to sequence the entire mitochondrial genome, only a select portion of it. Accordingly, a sample of mitochondrial DNA can provide a diagnosis.

Diagnosis of Non-Melanoma Skin Cancer

[0158] In a preferred embodiment of the invention, a system for early diagnosis of mtDNA changes in non-melanoma skin cancer (NMSC) and their precursor lesions indicative of solid tumour development is provided. The particular changes, such as the common deletion and associated mutations, and the incidence of as yet uncharacterised deletions in mtDNA serve as reliable bio-markers of potential skin cancer. The mutation fingerprint of the entire mtDNA genome in human NMSC and its precursor lesions is determined. Thus mtDNA changes are established as an early bio-marker of human skin cancer and its precursor lesions. Denaturing HPLC can then be used to assess low levels of heteroplasmy at the sequences of interest. This approach can also provide an insight into the development of early changes in other human tumours.

Diagnosis of Prostate Cancer

[0159] In another embodiment of the invention, a system for diagnosis of prostate cancer is provided. Age related accumulation of mtDNA defects might predispose an individual to the appearance of certain clinical disorders such as prostate cancer which is prevalent in middle age and older men. In a preferred embodiment, routine prostate cancer screening takes place through mitochondrial genome sequencing from prostate massage fluid. The presence of epithelial cells transformed into cancer cells, can be determined through amplification of mtDNA from prostate massage fluid, eclipsing current diagnostic techniques such as digital rectal examination and PSA. Recently Fliss et al. (2000) identified mutated mtDNA in urine samples of patients with bladder cancer. Similar findings in prostate massage fluid provide a non-invasive early detection method for prostate cancer. Different types of prostate cancer can be diagnosed, as well as differentiating between aggressive, fast growing cells in younger patients in contrast to prostate cancer as a whole.

Early Detection and Monitoring of Prostate Cancer Progression

[0160] The system and method of the present invention may be used to detect cancer, and in particular prostate cancer, at an early stage, and before any histological abnormalities. For example, the system and method of the present invention may be used to detect pre-neoplasia in prostate tissue. The system can be used to detect the genesis and progression of prostate cancer. Mutations, including both subtle and hyper-mutation (Chen et al. 2002; Chen et al. 2003) in mitochondrial DNA from human prostate tissue, or fluid associated with the prostate (for example prostate massage fluid or urine), can be tested for the presence of neoplasia, and retested at intervals to follow cancer transformation, diagnose malignancy, or confirm continued benign status.

[0161] These mutations are determined by comparison to mitochondria extracted from non-involved tissue such as, but not limited to: blood, urine, hair and buccal swabs. This direct comparison eliminates polymorphisms, maternal background or normal haplotype variation unassociated with disease. The mutations can also be compared to mitochondrial sequences associated with inter and intrapopulation variations. One or more mutations from fluid or tissue of the organ or body system in question, indicates possible disease genesis. The person is then monitored, at successive intervals, for an increase in mutations at other sites, and/or an increase in the number of mutated mitochondrial genomes, indicating disease progression. Benign tissue from the prostate cannot always be considered non-involved. In fact, as can be seen in Example 9, below, what appears to be benign tissue may contain mitochondrial mutations associated with pre-neoplasia, neoplasia, progression toward malignancy or malignancy. In addition, mutation load rather than specific mutations may be instrumental in determining disease and progression of disease. The system and method of the present invention detects heteroplasmic as well as homoplasmic mutations.

[0162] The prostate gland is monitored for mutations in the mitochondrial genome through prostate massage fluid (PMF) taken during an initial digital rectal examination (DRE) of the prostate. Cells within the PMF are concentrated, smeared on a slide and stained with PSA immunoperoxidase for identification of prostate epithelial cells. These prostate cells are selectively recovered through laser capture micro-dissection. The mitochondrial DNA from these cells is analyzed and compared to mitochondrial DNA from non-involved tissue, and to sequences of inter and intrapopulation variations. For example, the DNA analysis can comprise sequencing of the mtDNA. Total DNA is extracted from these cells and mitochondrial specific primers, designed for use with biopsy material treated with formalin (Table 5), are used to amplify the entire mtDNA genome with overlapping amplicons. These PCR products are then sequenced by methods well known to those in the art, including DNA resequencing arrays. Sequencing results are screened for heteroplasmies and mutations and compared to a database of known mtDNA mutations associated with malignant and benign prostate tissues. Based on these comparisons a designation is returned as to the condition of the prostate in regards to, but not limited to: benign (no mutations); pre-neoplasia or neoplasia (low level of mutations); or malignancy (high level of mutations). In the situation of benign, pre-neoplasia and neoplasia, the prostate can be monitored for progression through regular PMF screenings as described.

[0163] Alternatively, biopsy material which has been diagnosed as benign, atypical, abnormal can undergo similar testing by either laser capture micro-dissection of the biopsy, or the tissue can be scrapped off the slides, followed by DNA extraction, amplification, sequencing and database comparison.

[0164] As an alternative to sequencing, and comparison to a database, micro-array technology could be used to identify a specific pattern of mutations, or mutation load based on any number, or combination of the mutations listed in Table 4, through the construction of oligonucleotides, or a specific set of oligonucleotides.

[0165] Disease progression can be monitored by comparing mtDNA mutations at successive intervals to a database of mutations in mitochondrial genomes associated with pre-neoplasia, neoplasia and prostate cancer, including calculation of total mutation load. Prostate biopsy tissue can be tested for pre-neoplasia, neoplasia and/or malignant progression in cells described clinically as benign, normal, atypical or abnormal by common histological/pathological, or other clinical methods.

Assessment of Mutations Associated with Aging

[0166] The system and method of the present invention may be used to assess aging, based on the increasing frequency of mutations such as the “common deletion” of 4977-bp and other mutations of the mitochondrial genome (Liu et al. 1997). This information, in conjunction with health survey data, allows crucial statistical discrimination between separate causes resulting in the same mutation/deletion. Fortunately mtDNA is inherited exclusively through the ovum and is essentially clonal in nature (Van De Graaff & Fox, 1995). This permits carefully controlled studies of mutations/deletions within maternal lines through several generations to determine a reliable age related deletion frequency. This information may be used to develop treatment methods which slow the aging process.

Collection of Samples

[0167] Biological samples can be collected by any known means, whether for the purpose of constructing a mtDNA sequence database, or performing a diagnostic test on an individual. Samples destined for database generation include, but are not limited to: tumour banks, maternal lineage studies involving affected and unaffected individuals from the same maternal lineage, as well as maternal lineage studies from groups or populations with high frequencies of specific disease such as, but not limited to: skin and prostate cancer, assessment of health status and aging. For example, FTA® Gene Cards® may be used to collect and archive biological samples. Suitable samples include any tissue or body fluid derived from mesothelium, epithelium, or endothelium. Such tissues and fluids include, but are not limited to blood, sputum, buccal cells, saliva, prostate massage fluid, sweat, bone, hair, lymph tissue, cervical smears, breast aspirate, fecal matter, ejaculate, menstrual flow and biopsy tissue. Preferably, approximately 100 μl of blood, 100 μg to 25 mg of solid tissue is sampled. In the case of suspected skin cancer, skin cells or tissue, (from normal, NMSC and precursor lesions) is taken from skin biopsy or a routine suction blistering technique. Where a disease is suspected, primary care physicians, oncologists or other practitioners, may extract both normal and suspected disease tissue from the patient.

[0168] For samples of tumours such as prostate or skin, replicate cross-sections (5 microns) of micro-dissected paraffin embedded tissues are de-paraffinized prior to one slide being stained with hematoxylin and eosin (HE), with the replicate stained with methyl green (MG), as is standard in the art. HE stains are graded by a pathologist for normal, precursor, and applicable grades of tumour progression. Replicate MG slides are used for laser capture, according to manufacturers recommendations (Arcturus) of graded cells.

Extraction of mtDNA

[0169] Extraction of DNA may take place using any method known in the art, followed by sequencing of the mitochondrial genome, as described in Current Protocols in Molecular Biology.

Analyzing mtDNA

[0170] The step of detecting the presence of mutations in the mtDNA can be selected from any technique as is known to those skilled in the art. For example, analyzing mtDNA can comprise sequencing the mtDNA, amplifying mtDNA by PCR, Southern, Northern, Western South-Western blot hybridizations, denaturing HPLC, hybridization to microarrays, biochips or gene chips, molecular marker analysis, biosensors, melting temperature profiling or a combination of any of the above. In addition, statistical techniques such as Inductive Rule Extraction, Neural Networking and Wave Analysis can be used.

Sequencing of MtDNA

PCR

[0171] Polynucleotide sequences of the invention can be amplified by the polymerase chain reaction (PCR). PCR methods are well-known to those skilled in the art. PCR requires the presence of a nucleic acid to be amplified, two single stranded oligonucleotide primers flanking the sequence to be amplified, a DNA polymerase, deoxyribonucleoside triphosphates, a buffer and salts. The method of PCR is well known in the art. PCR is performed as described in Mullis and Faloona, 1987, Methods Enzymol., 155: 335, herein incorporated by reference.

[0172] In general, PCR is performed using template DNA (at least 1 fg; more usefully, 1-1000 ng) and at least 25 pmol of oligonucleotide primers. A typical reaction mixture includes: 2 μl of DNA, 25 pmol of oligonucleotide primer, 2.5 μl of 10×PCR buffer 1 (Perkin-Elmer, Foster City, Calif.), 0.4 μl of 1.25 μM dNTP, 0.15 μl (or 2.5 units) of Taq DNA polymerase (Perkin Elmer, Foster City, Calif.) and deionized water to a total volume of 25 μl. Mineral oil is overlaid and the PCR is performed using a programmable thermal cycler.

[0173] The length and temperature of each step of a PCR cycle, as well as the number of cycles, are adjusted according to the stringency requirements in effect. Annealing temperature and timing are determined both by the efficiency with which a primer is expected to anneal to a template and the degree of mismatch that is to be tolerated. The ability to optimize the stringency of primer annealing conditions is well within the knowledge of one of moderate skill in the art. An annealing temperature of between 30° C. and 72° C. is used. In general, initial denaturation of the template molecules normally occurs at between 92° C. and 99° C. for 4 minutes, followed by 20-40 cycles consisting of denaturation (94-99° C. for 15 seconds to 1 minute), annealing (temperature determined as discussed above; 1-2 minutes), and extension (72° C. for 1 minute). The final extension step is generally carried out for 4 minutes at 72° C., and may be followed by an indefinite (0-24 hour) step at 4° C.

DNA Sequencing

[0174] Any known means to sequence the mitochondrial genome may be used. Preferably, mtDNA is amplified by PCR prior to sequencing. PCR products can be sequenced directly or cloned into a vector which is then placed into a bacterial host. Examples of DNA sequencing methods are found in Brumley, R. L. Jr. and Smith, L. M., 1991, Rapid DNA sequencing by horizontal ultrathin gel electrophoresis, Nucleic Acids Res. 19:4121-4126 and Luckey, J. A., et al, 1993, High speed DNA sequencing by capillary gel electrophoresis, Methods Enzymol. 218: 154-172. The combined use of PCR and sequencing of mtDNA is described in Hopgood, R., et al, 1992, Strategies for automated sequencing of human mtDNA directly from PCR products, Biotechniques 13:82-92 and Tanaka, M. et al, 1996, Automated sequencing of mtDNA, Methods Enzymol. 264: 407-421

Deletion Analysis and Detection

[0175] A preferable approach is the long extension PCR (LX-PCR) technique using the Expand Long Template PCR system (Boehringer Mannheim). Using the LX-PCR technique, which has been established and validated in the Birch-Machin laboratory (Ray et al. 2000), there is the opportunity to rapidly screen for the whole spectrum of mtDNA deletions as opposed to the incidence of a single deletion.

[0176] A semi-quantitative PCR method (Corral-Debrinski et al 1991) can be used to estimate the proportion of the mtDNA⁴⁹⁷⁷ deletion in the total mtDNA.

[0177] In addition, Southern Blot and probing technology labeled with isotopes or any other technique as is standard in the art may be used for deletion detection as well.

Sequencing of PCR Products

[0178] Any known means may be used to sequence the PCR products. Preferably, the entire DNA sequence is characterized by di-deoxy sequencing using ABI Big Dye Terminator™ technology and a series of 72 overlapping primers each for heavy and light strands. Sequencing occurs on one, several, or a combination of ABI platforms such as the 310, 3100, or 3700. Sequencing reactions are performed according to manufacturer's recommendation.

Mutational Analysis of the Mitochondrial Genome Using Denaturing High Performance Liquid Chromatography (DHPLC)

[0179] Prior to sequencing of the mitochrondrial genome and identification of mutational hotspots, DHPLC can be used to rapidly screen mutations in many samples. This technique provides greater sensitivity in identification of low levels of heteroplasmy. It cannot detect homoplasmic changes but will complement traditional sequencing. Apart from the homoplasmic mutations recently identified in tumours, the vast majority of reported mtDNA mutations are heteroplasmic (Chinnery et al. 1999). These heteroplasmic mtDNA changes result in the formation of heteroduplexes after PCR amplification of the mtDNA. Rapid screening for heteroplasmic mtDNA mutations is determined using the relatively new technique of denaturing high performance liquid chromatography (DHPLC) (Oefner & Underhill, 1998). This technique has recently been used to rapidly screen and identify whole mtDNA genomes for heteroplasmic point mutations down to levels <5% (Van den Bosch et al. 2000).

[0180] The DHPLC may be performed on the WAVE™ DNA Fragment Analysis System (Transgenomic, Omaha, USA) which provides a fully automated screening procedure. The same technology can be used to screen for mtDNA heteroplasmic mutations. Preferably, the entire mtDNA genome is amplified by PCR in 13 overlapping fragments using two different PCR conditions as described by van den Bosch et al. (2000). The 1-2 kb PCR products are digested into fragments of 90-600 bp and resolved at their optimal melting temperature. Mutations are represented as two peaks and mutations with low percentages, such as <2% heteroplasmy as a ‘shoulder’ in the peak.

[0181] DNA sequencing can also take place using a microarray, as is known in the art (Chee et al. 1996).

Data Analysis

[0182] Once sequenced, normal and disease associated mtDNA sequences are archived for comparison in a database. Resequencing devices, micro-array technology, integrated microfluidic amplification and analysis systems, high-speed, high-throughput, mutation detection, and other methods may all be used with the methods of the present invention.

[0183] Data obtained from the sequencing of the individual mitochondrial genome is compared to population level data. The data is obtained through obtaining samples and sequencing mtDNA as described above. Preferably, the database contains information from maternal line studies. The population level data is maintained in a database. Any suitable database can be used.

[0184] Preferably, a multidimensional evaluation research database of clinical and biological data is used, which provides the bio-informatics infrastructure necessary for the collection, processing and dissemination of information amassed by the laboratories involved in this venture. The database is a centralized electronic system which links networks resulting in a dynamic and powerful resource.

[0185] The database may be accessed through any known means, and preferably through a secure Internet pathway. Preferably, the database is developed using an e-commerce algorithm, built on a server and deployed using an application server which supports a high volume of concurrent users through optimized performance and scalability features. A separate “web” server can provide the foundation of the web-site architecture since it can serve as the central point through which all content, applications, and transactions must flow before reaching users.

[0186] Data mining algorithms known in the art are used to discover patterns, clusters and models from data (SAS 2000). Moreover, intelligent algorithms and methods will be developed for: occurrence of mutation and mutation rates, patterns of mutations for disease detection, information retrieval, and other complex sequence analysis software.

Nucleic Acid Members and Probes

[0187] The invention provides for nucleic acid members and probes that bind specifically to a target nucleic acid sequence. The target nucleic acid sequence is a nucleic acid or a region of a nucleic acid that is to be detected, as indicative of disease such as prostate cancer, non-melanoma skin cancer and the like. The target nucleic acid sequences to be analyzed using a microarray of the invention are preferably derived from human tissue or fluid samples. The invention provides for target nucleic acid sequences comprising RNA or nucleic acid corresponding to RNA, (i.e., cDNA), or DNA. Nucleic acid members are stably associated with a solid support to comprise an array according to the invention. The nucleic acid members may be single or double stranded, and may be a PCR fragment amplified from cDNA.

[0188] The invention also provides for polynucleotide sequences comprising a probe. As used herein, the term “probe” refers to an oligonucleotide which forms a duplex structure with a sequence in the target nucleic acid, due to complementarity of at least one sequence in the probe with a sequence in the target region. The probe may be labeled, according to methods known in the art. A probe according to the invention may be single or double stranded.

Diagnostic Devices

[0189] The invention includes diagnostic devices such as biochips, gene chips or microarrays used to diagnose specific diseases or identify specific mutations. All sequenced mitochondrial genomes are assessed to create a consenus structure of the base pair arrangement and are assigned a prohibiting index for proportion of base pair deletions and mutations associated with a particular disease or disorder. The diagnostic arrangement is then used to create biochips, gene chips, or microarrays.

[0190] Once sequences associated with particular diseases, disease states or disorders are identified, hybridization of mtDNA to an array of oligonucleotides can be used to identify particular mutations. Any known method of hybridization may be used. Preferably, an array is used, which has oligonucleotide probes matching the wild type or mutated region, and a control probe. Commercially available arrays such as microarrays or gene chips are suitable. These arrays contain thousands of matched and control pairs of probes on a slide or microchip, and are capable of sequencing the entire genome very quickly. Review articles describing the use of microarrays in genome and DNA sequence analysis is available at www.gene-chips.com.

Microarray

[0191] Polynucleotide arrays provide a high throughput technique that can assay a large number of polynucleotides in a sample comprising one or more target nucleic acid sequences. The arrays of the invention are useful for gene expression analysis, diagnosis of disease and prognosis of disease (e.g., monitoring a patient's response to therapy, drug screening, and the like).

[0192] Any combination of the polynucleotide sequences of mtDNA indicative of disease, aging, or other health related mutations are used for the construction of a microarray.

[0193] The target nucleic acid samples to be analyzed using a microarray are derived from any human tissue or fluid which contains adequate amounts of mtDNA, as previously described, preferably prostate massage fluid, solid tumours, blood, or urine. The target nucleic acid samples are contacted with polynucleotide members under hybridization conditions sufficient to produce a hybridization pattern of complementary nucleic acid members/target complexes.

Construction of a Microarray

[0194] The microarray comprises a plurality of unique polynucleotides attached to one surface of a solid support, wherein each of the polynucleotides is attached to the surface of the solid support in a non-identical preselected region. Each associated sample on the array comprises a polynucleotide composition, of known identity, usually of known sequence, as described in greater detail below. Any conceivable substrate may be employed in the invention.

[0195] The array is constructed using any known means. The nucleic acid members may be produced using established techniques such as polymerase chain reaction (PCR) and reverse transcription (RT). These methods are similar to those currently known in the art (see e.g. PCR Strategies, Michael A. Innis (Editor), et al. (1995) and PCR: Introduction to Biotechniques Series, C. R. Newton, A. Graham (1997)). Amplified polynucleotides are purified by methods well known in the art (e.g., column purification). A polynucleotide is considered pure when it has been isolated so as to be substantially free of primers and incomplete products produced during the synthesis of the desired polynucleotide. Preferably, a purified polynucleotide will also be substantially free of contaminants which may hinder or otherwise mask the binding activity of the molecule.

[0196] In the arrays of the invention, the polynucleotide compositions are stably associated with the surface of a solid support, wherein the support may be a flexible or rigid solid support.

[0197] Any solid support to which a nucleic acid member may be attached may be used in the invention. Examples of suitable solid support materials include, but are not limited to, silicates such as glass and silica gel, cellulose and nitrocellulose papers, nylon, polystyrene, polymethacrylate, latex, rubber, and fluorocarbon resins such as TEFLON™.

[0198] The solid support material may be used in a wide variety of shapes including, but not limited to slides and beads. Slides provide several functional advantages and thus are a preferred form of solid support. Due to their flat surface, probe and hybridization reagents are minimized using glass slides. Slides also enable the targeted application of reagents, are easy to keep at a constant temperature, are easy to wash and facilitate the direct visualization of RNA and/or DNA immobilized on the solid support. Removal of RNA and/or DNA immobilized on the solid support is also facilitated using slides.

[0199] The particular material selected as the solid support is not essential to the invention, as long as it provides the described function. Normally, those who make or use the invention will select the best commercially available material based upon the economics of cost and availability, the expected application requirements of the final product, and the demands of the overall manufacturing process.

[0200] Numerous methods are used for attachment of the nucleic acid members of the invention to the substrate (a process referred as spotting). For example, polynucleotides are attached using the techniques of, for example U.S. Pat. No. 5,807,522, which is incorporated herein by reference for teaching methods of polymer attachment. Alternatively, spotting is carried out using contact printing technology.

[0201] The amount of polynucleotide present in each composition will be sufficient to provide for adequate hybridization and detection of target polynucleotide sequences during the assay in which the array is employed. Generally, the amount of each nucleic acid member stably associated with the solid support of the array is at least about 0.1 ng, preferably at least about 0.5 ng and more preferably at least about 1 ng, where the amount may be as high as 1000 ng or higher, but will usually not exceed about 20 ng. Where the nucleic acid member is “spotted” onto the solid support in a spot comprising an overall circular dimension, the diameter of the “spot” will generally range from about 10 to 5,000 μm, usually from about 20 to 2,000 μm and more usually from about 50 to 1000 μm.

[0202] Control polynucleotides may be spotted on the array and used as target expression control polynucleotides and mismatch control nucleotides to monitor non-specific binding or cross-hybridization to a polynucleotide in the sample other than the target to which the probe is directed. Mismatch probes thus indicate whether a hybridization is specific or not. For example, if the target is present the perfectly matched probes should be consistently brighter than the mismatched probes. In addition, if all central mismatches are present, the mismatch probes are used to detect a mutation.

Target Preparation

[0203] The targets for the microarrays, are derived from human fluid or tissue samples. It may be desirable to amplify the target nucleic acid sample prior to hybridization. One of skill in the art will appreciate that whatever amplification method is used, if a quantitative result is desired, care must be taken to use a method that maintains or controls for the relative frequencies of the amplified polynucleotides. Methods of “quantitative” amplification are well known to those of skill in the art. For example, quantitative PCR involves simultaneously co-amplifying a known quantity of a control sequence using the same primers. This provides an internal standard that may be used to calibrate the PCR reaction. The high density array may then include probes specific to the internal standard for quantification of the amplified polynucleotide. Detailed protocols for quantitative PCR are provided in PCR Protocols, A Guide to Methods and Applications, Innis et al., Academic Press, Inc. N.Y., (1990). Other suitable amplification methods include, but are not limited to polymerase chain reaction (PCR) (Innis, et al., PCR Protocols. A guide to Methods and Application. Academic Press, Inc. San Diego, (1990)), ligase chain reaction (LCR) (see Wu and Wallace, Genomics, 4: 560 (1989), Landegren, et al., Science, 241: 1077 (1988) and Barringer, et al., Gene, 89: 117 (1990), transcription amplification (Kwoh, et al., Proc. Natl. Acad. Sci. USA, 86: 1173 (1989)), and self-sustained sequence replication (Guatelli, et al., Proc. Nat. Acad. Sci. USA, 87: 1874 (1990)).

[0204] The invention provides for labeled target or labeled probe. Any analytically detectable marker that is attached to or incorporated into a molecule may be used in the invention. An analytically detectable marker refers to any molecule, moiety or atom which is analytically detected and quantified. Detectable labels suitable for use in the present invention include any composition detectable by spectroscopic, photochemical, biochemical, immunochemical, electrical, optical or chemical means. Useful labels in the present invention include biotin for staining with labeled streptavidin conjugate, magnetic beads (e.g., Dynabeads™), fluorescent dyes (e.g., fluorescein, texas red, rhodamine, green fluorescent protein, and the like), radiolabels (e.g., ³H, ¹²⁵I, 35S, ¹⁴C, or ³²P), enzymes (e.g., horseradish peroxidase, alkaline phosphatase and others commonly used in an ELISA), and colorimetric labels such as colloidal gold or colored glass or plastic (e.g., polystyrene, polypropylene, latex, etc.) beads. Patents teaching the use of such labels include U.S. Pat. Nos. 3,817,837; 3,850,752; 3,939,350; 3,996,345; 4,277,437; 4,275,149; and 4,366,241.

[0205] Means of detecting such labels are well known to those of skill in the art. Thus, for example, radiolabels may be detected using photographic film or scintillation counters, fluorescent markers may be detected using a photodetector to detect emitted light. Enzymatic labels are typically detected by providing the enzyme with a substrate and detecting the reaction product produced by the action of the enzyme on the substrate, and colorimetric labels are detected by simply visualizing the colored label.

[0206] The labels may be incorporated by any of a number of means well known to those of skill in the art. However, in a preferred embodiment, the label is simultaneously incorporated during the amplification step in the preparation of the sample polynucleotides. Thus, for example, polymerase chain reaction (PCR) with labeled primers or labeled nucleotides will provide a labeled amplification product. In a preferred embodiment, transcription amplification, as described above, using a labeled nucleotide (e.g. fluorescein-labeled UTP and/or CTP) incorporates a label into the transcribed polynucleotides. Alternatively, a label may be added directly to the original polynucleotide sample (e.g., mRNA, polyA mRNA, cDNA, etc.) or to the amplification product after the amplification is completed. Means of attaching labels to polynucleotides are well known to those of skill in the art and include, for example nick translation or end-labeling (e.g. with a labeled RNA) by kinasing of the polynucleotide and subsequent attachment (ligation) of a polynucleotide linker joining the sample polynucleotide to a label (e.g., a fluorophore).

[0207] In a preferred embodiment, the target will include one or more control molecules which hybridize to control probes on the microarray to normalize signals generated from the microarray. Labeled normalization targets are polynucleotide sequences that are perfectly complementary to control oligonucleotides that are spotted onto the microarray as described above. The signals obtained from the normalization controls after hybridization provide a control for variations in hybridization conditions, label intensity, “reading” efficiency and other factors that may cause the signal of a perfect hybridization to vary between arrays.

Hybridization Conditions

[0208] Polynucleotide hybridization involves providing a denatured probe or target nucleic acid member and target polynucleotide under conditions where the probe or target nucleic acid member and its complementary target can form stable hybrid duplexes through complementary base pairing. The polynucleotides that do not form hybrid duplexes are then washed away leaving the hybridized polynucleotides to be detected, typically through detection of an attached detectable label. It is generally recognized that polynucleotides are denatured by increasing the temperature or decreasing the salt concentration of the buffer containing the polynucleotides. Under low stringency conditions (e.g., low temperature and/or high salt) hybrid duplexes (e.g., DNA:DNA, RNA:RNA, RNA:DNA, cDNA:RNA and cDNA:DNA) will form even where the annealed sequences are not perfectly complementary. Thus specificity of hybridization is reduced at lower stringency. Conversely, at higher stringency (e.g., higher temperature or lower salt) successful hybridization requires fewer mismatches. Methods of optimizing hybridization conditions are well known to those of skill in the art (see, e.g., Laboratory Techniques in Biochemistry and Molecular Biology, Vol. 24: Hybridization With Polynucleotide Probes, P. Tijssen, ed. Elsevier, N.Y., (1993)).

[0209] Following hybridization, non-hybridized labeled or unlabeled polynucleotide is removed from the support surface, conveniently by washing, thereby generating a pattern of hybridized target polynucleotide on the substrate surface. A variety of wash solutions are known to those of skill in the art and may be used. The resultant hybridization patterns of labeled, hybridized oligonucleotides and/or polynucleotides may be visualized or detected in a variety of ways, with the particular manner of detection being chosen based on the particular label of the test polynucleotide, where representative detection means include scintillation counting, autoradiography, fluorescence measurement, calorimetric measurement, light emission measurement and the like.

Image Acquisition and Data Analysis

[0210] Following hybridization and any washing step(s) and/or subsequent treatments, as described above, the resultant hybridization pattern is detected. In detecting or visualizing the hybridization pattern, the intensity or signal value of the label will be not only be detected but quantified, by which is meant that the signal from each spot of the hybridization will be measured and compared to a unit value corresponding to the signal emitted by a known number of end labeled target polynucleotides to obtain a count or absolute value of the copy number of each end-labeled target that is hybridized to a particular spot on the array in the hybridization pattern.

[0211] Methods for analyzing the data collected from hybridization to arrays are well known in the art. For example, where detection of hybridization involves a fluorescent label, data analysis can include the steps of determining fluorescent intensity as a function of substrate position from the data collected, removing outliers, i.e., data deviating from a predetermined statistical distribution, and calculating the relative binding affinity of the test polynucleotides from the remaining data. The resulting data is displayed as an image with the intensity in each region varying according to the binding affinity between associated oligonucleotides and/or polynucleotides and the test polynucleotides.

[0212] Following detection or visualization, the hybridization pattern is used to determine quantitative information about the genetic profile of the labeled target polynucleotide sample that was contacted with the array to generate the hybridization pattern, as well as the physiological source from which the labeled target polynucleotide sample was derived. By genetic profile is meant information regarding the types of polynucleotides present in the sample, e.g. in terms of the types of genes to which they are complementary, as well as the copy number of each particular polynucleotide in the sample.

Diagnostic or Prognostic Tests

[0213] The invention provides for diagnostic tests for detecting diseases. The invention also provides for prognostic tests for monitoring a patient's response to therapy. According to the method of the invention, the presence of disease or the patient's response to therapy is detected by obtaining a fluid or tissue sample from a patient. A sample comprising nucleic acid is prepared from the fluid or tissue sample. The nucleic acid extracted from the sample is hybridized to an array comprising a solid substrate and a plurality of nucleic acid members, wherein each member is indicative of the presence of disease or a predisposition to a disease or disorder. According to this diagnostic test, hybridization of the sample comprising nucleic acid to one or more nucleic acid members on the array is indicative of disease, a predisposition to a disease or disorder, or in the case of a prognostic test, indicative of a patient's response to therapy.

Kits

[0214] Kits containing reagents and instructions to carry out the methods of the present invention are provided. For example, the kit may comprise reagents and instructions for detecting mitochondrial mutations, heteroplasmies, homoplasmies in tissue specific samples and tissue associated fluids. The kits may also comprise one or more primers which hybridize to the mitochondrial genome for making a primer extension product. Kits may also include a disposable chip, means for holding the disposable chip, means for extraction of mtDNA and means for access to a database of mtDNA sequences.

[0215] Other utilities for the present invention, such as that described above and in the following examples, will be readily apparent to those skilled in the art.

[0216] The present invention is more particularly described in the following examples which are intended as illustrative only since numerous modifications and variations will be apparent to those skilled in the art.

### EXAMPLE 1

### Prostate Tumours

[0217] Following acquisition of prostate fluid or surgery to remove prostate tumours, biopsy slides are prepared to identify transforming or cancerous cells. Laser Capture Microdissection (LCM) microscopy is used to isolate cells that are either normal, benign, or malignant from the tissue section. Procurement of diseased cells of interest, such as precancerous cells or invading groups of cancer cells is possible from among the surrounding heterogeneous cells.

[0218] Total DNA extraction from each of these cells was purified according to a modification of the protocol outlined by Arcturus Engineering Inc. DNA was extracted from cells with a 50 μl volume of I mg/ml proteinase K (PK), in IOmM Tris pH 8.0, O.1 mM EDTA pH 8.0, and 0.1% Tween 20, at 42° C. overnight. Following incubation overnight at 42° C. the tubes were removed from the incubation oven. The samples were microcentrifuged for 5 min at 6400 rpm (2000×g). The CapSure™ was removed from the tube and discarded. The tube was incubated at 95° C. for 10 minutes (PK is inactivated) and then cooled to room temperature. 5-50 μl of the sample was used for PCR amplification.

[0219] Following purification, individual samples are amplified, by LX-PCR using the appropriate primers for hypervariable region 1 (HV1), hypervariable region 2 (HV2) and the entire 12S region. These PCR products are then sequenced using high throughput methods as is well known in the art.

[0220] Alternatively, full length mitochondrial genomes may be amplified using the primers in Table 5. Specific capture and amplification of DNA derived from malignant tumour cells of any Geason Grade, cells from an adjacent benign gland and cells from a “distant” benign gland may be amplified. Other prostate tissues which could and are amplified includes: prostatic intraepithelial neoplasia (PIN), benign prostatic hyperplasia (BPH), hyperplasia of various types, stroma, and cells with undetermined changes. This work was done on prostate tissues from 31 individuals electing to have a prostatectomy because of a prostate cancer diagnosis. Three tissue types were captured: malignant, adjacent benign and distant benign from each individual. Blood from each patient was used as a positive, non-diseased tissue control. Amplification and sequencing of these samples resulted in the novel mutations seen in Table 4. The mutations of Table 4 are also provided in SEQ ID No: 102 which lists the substitutions, SEQ ID NOs: 103 to 109 which lists the deletions, and SEQ ID No: 110 to 138 which lists the insertions. Polymorphisms and mutation positions were determined by comparison to the Revised Cambridge Reference Sequence (2001), however the historical numbering has been maintained such that the deletion at position 3106 is denoted as a gap and the rare polymorphism 750A has been retained. A subset of this data (7 protein coding regions) was then subjected to principal component analysis, as is standard in the art, with the following results as shown in Table 1a:

TABLE 1a

| | | distant | adjacent | | |
|---|---|---|---|---|---|
| | blood | benign | benign | malignant | unknown |
| blood | 100.00% | 0.00% | 0.00% | 0.00% | 0.00% |
| distant | 16.13% | 35.48% | 9.68% | 29.03% | 16.13% |
| benign | | | | | |
| adjacent | 12.9% | 12.90% | 45.16% | 3.22% | 25.81% |
| benign | | | | | |
| malignant | 3.22% | 0.00% | 0.00% | 96.78% | 0.00% |

[0221] The results demonstrate a clear pattern of malignant transformation. Normal tissue (blood) and malignant tissue display high clustering frequencies (1.00 and 0.967). Interestingly, adjacent and distant benign, both of which appear normal in a histological and pathological sense, show levels of transformation with over 50% of the samples falling outside the distant benign and adjacent benign intercepts. Moreover, the same data was analyzed by a neural network, as is standard in the art, with the following results as shown in Table 1b:

TABLE 1b

| | | distant | adjacent | |
|---|---|---|---|---|
| | Blood | benign | benign | malignant |
| blood | 100.00% | 0.00% | 0.00% | 0.00% |
| distant | 6.45% | 0.00% | 0.00% | 93.55% |
| benign | | | | |
| adjacent | 19.35% | 0.00% | 0.00% | 77.14% |
| benign | | | | |
| malignant | 3.22% | 0.00% | 0.00% | 96.78% |

[0222] This table shows that, in the presence of tumour, all prostate tissue is considered malignant at the molecular level, even though histological appearance of the tissue may be “normal.”

TABLE 1c
MUTATION REGIONS - ND1, ND2, COX1 and CYTB

| | distant benign | adjacent benign | malignant |
|---|---|---|---|
| 1. | 105DB - 6037 | 105AB - 4655 | 105ML - 4655, |
| | | | 4917, 7407 |
| 2. | 208DB | 208AB - 4917, | 208ML - 4722, |
| | | 5174, 5985, 6776 | 6553, 7028 |
| 3. | 349DB | 349AB | 349ML - 6548 |
| 4. | 377DB - 4735, | 377AB | 377ML - 4917, |
| | 5984, 6912 | | 6686, 7028, 7407, |
| | | | 15452, 15607 |
| 5. | 378DB | 378AB - 6776, | 378ML - 4703 |
| | | 15043 | |
| 6. | 380DB - 3469, | 380AB - 4917, | 380ML - 15218 |
| | 3507, 15218, | 4951, 5440, 6059 | |
| 7. | 382DB - 6307, | 382AB - 4716, | 382ML - 6147, |
| | 7028, 7407, 15452, | 5312, 5371, | 6691, 7178, 15523 |
| | 15527, 15607 | 15162, 15323, | |
| | | 15324 | |
| 8. | 384DB - 4733, | 384AB - 6219, | 384ML - 4733, |
| | 7028 | 15452, 15607 | 7028 |
| 9. | 386DB - 15677 | 386AB - 15244, | 386ML |
| | | 15301, 15452, | |
| | | 15607, 15670 | |
| 10. | 416DB - 4561, | 416AB | 416ML - 4864 |
| | 15326, 15525 | | |
| 11. | 417DB | 417AB | 417ML - 4917 |
| 12. | 418DB | 418AB - 7159 | 418ML - 7028, |
| | | | 7407 |
| 13. | 426DB | 426AB | 426ML - 4892, |
| | | | 5102, 5213 |
| 14. | 449DB - 4646, | 449AB | 449ML |
| | 4917, 5999, 6047, | | |
| | 7407 | | |
| 15. | 450DB - 15323 | 450AB - 4917, | 450ML - 3398, |
| | | 5300, 15323 | 5147, 6009, 15323 |
| 16. | 451DB | 451AB - 4217 | 451ML |
| 17. | 452DB - 4018, | 452AB - 3308, | 452ML - 3480, |
| | 6557, 15286 | 3480, 3594, 3666, | 4591, 5268, 7159, |
| | | 3693, 5036, 5046, | 7407 |
| | | 5393, 5984, 6548, | |
| | | 6827, 6989, 7055, | |
| | | 7146, 7256, 7389, | |
| | | 15115 | |
| 18. | 455DB - 7160 | 455AB | 455ML |
| 19. | 456DB - 3589, | 456AB - 4216, | 456ML - 4787, |
| | 4216, 5312, 5424, | 4787, 4917, 7407, | 6579, 7059, 15302 |
| | 6041, 7013, 7407, | 15343, 15452, | |
| | 15384, 15452 | 15607 | |
| 20. | 457DB | 457AB | 457ML |
| 21. | 458DB - 5198, | 458AB | 458ML |
| | 7407 | | |
| 22. | 460DB - 5147 | 460AB | 460ML |
| 23. | 461DB - 7028, | 461AB - 3394, | 461ML - 7184 |
| | 7184 | 7184, 14899 | |
| 24. | 463DB - 14903 | 463AB - 14903 | 463ML - 14903 |
| 25. | 464DB | 464AB | 464ML - 6314, |
| | | | 6643, 6667, 7028, |
| | | | 7066, 7407, 15265 |
| 26. | 466DB - 3507, | 466AB - 3908, | 466ML - 6382, |
| | 7028 | 3969, 3992, 4017, | 6776, 15527 |
| | | 4185, 4239, 7028 | |
| 27. | 467DB | 467AB - 4917, | 467ML |
| | | 5147 | |
| 28. | 498DB - 14903, | 498AB - 14918 | 498ML |
| | 14918, 15355 | | |
| 29. | 501DB - 4580, | 501AB - 4580, | 501ML - 3966, |
| | 4826, 6224, 7007 | 6776 | 4569, 4580, 4917, |
| | | | 15379 |
| 30. | 504DB - 3507 | 504AB | 504ML |
| 31. | 505DB - 15307, | 505AB - 4216, | 505ML |
| | 15526 | 4917, 5456, 6776, | |
| | | 6953, 7028, 7407, | |
| | | 15452 | |

Cluster Analysis

[0223] The mutations identified in the 31 individuals diagnosed with prostate cancer were analyzed using Hierarchical Clustering Explorer (HCE) (www.cs.umd.edu/hcil/multi-cluster; Seo et al, 2002; Seo et al. 2003; Zhao et al 2003; Seo and Shneiderman; Seo et al; 2004a; Seo et al. 2004b; Seo et al. 2005a; Seo et al. 2004c; Seo et al. 2005b). In addition, the mitochondrial genomes from prostate needle biopsy tissue of 12 males clinically symptomatic for prostate cancer, but where pathology results indicated that the prostate tissue was not malignant, were also analyzed. FIGS. 2 and 3 show the cluster analysis of the identified non-synonymous mitochondrial mutations. FIG. 2 is the first half of the cluster analysis and FIG. 3 is the second half of the cluster analysis. The y-axis lists the patient numbers for the 31 individuals with prostate cancer (105, 208, 349, 377, 378, 380, 382, 384, 386, 416, 417, 418, 426, 449, 450, 451, 452, 455, 456, 457, 458, 460, 461, 463, 464, 466, 467, 498, 501, 504, 505) and the 12 individuals showing clinical symptoms but having no malignancy as determined by pathology (2, 35, 51, 209, 270, 278, 375, 480, 503, 536, 560, 858). The y-axis also indicates the source of the tissue (i.e. distant benign (db), adjacent benign (ab), malignant (ml), and (b) blood). Benign glandular tissue from symptomatic but non-malignant tissue of the 12 individuals is indicated by “gl”. The x-axis lists the sites of the mutations.

[0224] FIG. 4 is a copy of FIG. 3 showing a suite of non-synonymous mutations associated with clinical prostate cancer in the shaded area. The mutations occur in specific genes: Mutations at positions 4216 and 4217 both occur in the ND1 gene (NADH dehydrogenase subunit 1). The mutation at position 4917 occurs in the ND2 gene (NADH dehydrogenase subunit 2). The mutation at position 7407 occurs in the COXI gene (cytochrome c oxidase subunit 1). Finally, the mutation at position 15452 occurs in the CytB gene (cytochrome b). Mutations 4216 and 4217 invoke a non-synonymous mutation at the same amino acid, and like 4917, are secondary mutations associated with Leber's Hereditary Optic Neuropathy (LHON) (Mitochondrial Research Society; Huoponen, 2001; MitoMap). Other than prostate cancer, an association for 7407 remains unattested. A mutation at 15452 was found in 5/5 patients with ubiquinol cytochrome c reductase (complex III) deficiency (Valnot et al. 1999).

[0225] In the cohort of 31 men who underwent a prostatectomy for prostate cancer these mutations, one or more, were noted in 20 of the subjects (64.5%). As mentioned above, in each of these individuals, total mitochondrial genome sequences were obtained from prostate cross sections for three types of associated tissues: malignant, benign tissue adjacent to malignant tissue and “distant” benign tissue, removed from any surrounding tissue pathology. Tissues were laser capture microdisssected (LCM) by a qualified, clinical pathologist. Sequences were compared to mitochondrial DNA (mtDNA) extracted and sequenced from the patient's blood. Sequencing results indicate that mitochondrial mutations, often heteroplasmic, appear in all three tissue types. Contrary to the analysis of Alonso et al. (2005), mutations in mitochondrial DNA from malignant tissue, adjacent benign and distant benign were found in comparison with mtDNA sequences from the patient's blood. Heteroplasmy, mutant and normal mitochondrial genomes existing within the same individual, is considered evidence of recent mutation (Huoponen, 2001). Most mutations are not held in common between the three tissue types from the same individual. In fact, the comparative mutation loads for each tissue type is roughly the same, indicating that mtDNA mutations are active within the prostate in the presence of tumour, irrespective of prostate tissue type. Moreover, tissue which appears histologically benign, is often found with mutations in the mitochondrial genome. These mutations are not associated with mitochondrial sequences embedded in the nucleus, or NUMTS (nuclear/mitochondrial sequences) (Lopez, 1994). A lengthy cloning and sequencing study of human NUMTS utilizing a Rho⁰ cell line, as well as comparison to known NUMTS archived in the NCBI database was done and no mutations were detected to known mitochondrial pseudogenes archived in public databases to ensure data clean of pseudogene data points.

[0226] In the 12 males clinically symptomatic for prostate cancer, wherein the pathology results indicated that the prostate tissue was not malignant, benign glandular tissue was recovered by LCM and the mitochondrial genomes amplified and sequenced from prostate needle biopsy tissues. Results indicate a complete absence of mtDNA mutations in four patients, mutations only in the non-coding control region in four patients, or mutations in both the control region and gene coding regions in four patients. However, the mutation locations were significantly different than the malignant cohort (P>0.01). Additionally, only one coding region mutation was observed in these individuals and of these mutations one fell into the regions mentioned above (i.e. NDI, ND2, COXI and CytB) (patient 375 CytB at position 15081).

[0227] When both synonymous and non-synonymous mutations, inclusive of the four protein coding regions, were used as malignant disease markers, 30/31 (97%) of the prostate cancer group was identified. Table 1c lists the synonymous and non-synonymous mutations found in ND1, ND2, COX1, and CytB in tissue samples from the 31 individuals with prostate cancer. Mutations in ND1, ND2, COX1, and CytB are clearly associated with prostate cancer. Although the present invention has identified the mutations listed in Table 1c and FIGS. 2 to 4, the invention includes any mutations in ND1, ND2, COX1 and CytB. In the same analyses, 1 of the 12 benign, symptomatic patients was included with the malignant group; however, this patient had a mutation in CytB, which may indicate early cancer progression. The rest of this group clustered with the blood, or normal control.

[0228] A statistical analysis of distant benign from malignant subjects compared to the benign glands of the 12 symptomatic but not malignant patients was done. Since there were 31 malignant patients and 12 symptomatic but not malignant subjects, random samples of 6 groups of 12 from the malignant patients were run against the 12 symptomatic but not malignant subjects. A chi square analysis for each of the 6 groups was run. The results are listed in Table 1d. In every case, the differences were significant at 0.01 level, meaning that the difference between mitochondrial sequences from distant benign tissue in malignant subjects and mitochondrial sequences from symptomatic but not malignant subjects was not due to chance 99% of the time. The analysis was based on the number of mutations found in the four coding regions discussed above.

TABLE 1d
Chi-square test

| Tissues | ND1 | ND2 | COI | CYTB | Xi-Square |
|---|---|---|---|---|---|
| Symptomatic | 0 | 0 | 0 | 1 | |
| First set | 10 | 8 | 12 | 7 | 35.14 |
| Second set | 3 | 6 | 14 | 9 | 30.11 |
| Third set | 4 | 2 | 7 | 8 | 19.12 |
| Fourth set | 3 | 4 | 7 | 11 | 23.09 |
| Fifth set | 4 | 5 | 10 | 8 | 25.12 |
| Sixth set | 4 | 1 | 5 | 9 | 17.11 |

Symptomatic Patients - 12; Distant Benign - 6 random sets of 12 each
1 First set of DB - 426, 456, 450, 449, 380, 501, 386, 456, 466, 378, 457, 504
2 Second set of DB - 377, 105, 451, 417, 501, 456, 426, 498, 382, 461, 384, 464
3 Third set of DB - 467, 208, 466, 505, 452, 458, 105, 498, 380, 463, 208, 377
4 Fourth set of DB - 416, 504, 457, 466, 382, 452, 460, 450, 498, 386, 418, 501
5 Fifth set of DB - 456, 452, 461, 505, 464, 460, 378, 455, 417, 505, 449, 349
6 Sixth set of DB - 463, 426, 498, 349, 455, 466, 452, 380, 386, 461, 450, 460

### EXAMPLE 2

### Duplications in the Non-Coding Region of mtDNA from Sun-Exposed Skin

[0229] DNA was extracted from tissue samples as described in Example 1, with the use of DNeasy™ kit supplied by Qiagen. A “back to back” primer methodology was used to investigate the incidence of tandem duplications in the non-coding region (NCR) in relation to sun-exposure. 32 age-matched, split human skin samples, from sun-exposed (n=24) and sun-protected body sites (n=10) were investigated.

[0230] The following duplication primers from Brockington et al 1993 and Lee et al 1994 were used:

SEQ ID NO: 1

| | | | |
|---|---|---|---|
| C | L336 | AAC ACA TCT CTG CCA AAC CC | 20 mer |

SEQ ID NO: 2

| | | | |
|---|---|---|---|
| D | H335 | TAA GTG CTG TGG CCA GAA GC | 20 mer |

SEQ ID NO: 3

| | | | |
|---|---|---|---|
| E | L467 | CCC ATA CTA CTA ATC TCA TC | 20 mer |

SEQ ID NO: 4

| | | | |
|---|---|---|---|
| F | H466 | AGT GGG AGG GGA AAA TAA TG | 20 mer |

[0231] Primers pairs C/D and E/F are ‘back to back’ at the site of two separate sets of direct repeats in the non-coding region. As a result they only generate a product if a duplication is present at these points. Products generated are 260 bp and/or less common 200 bp variant. Modified PCR conditions are: 100 ng total cellular DNA, 200 μM dNTPs, 2.5 U HotStarTaq polymerase and PCR buffer (Qiagen, Uk), 25 pmoles of primers: one cycle of 94° C. for 4 minutes, 36 cycles of 94° C.×1 minute, 55° C.×1 minute, 72° C.×1 minute and one cycle of 72° C.×7 minutes.

[0232] An increased incidence of duplications with increasing sun-exposure was observed, with duplications identified in 10/24 but 0/10 samples from sun-exposed and sun-protected skin respectively (Fisher's exact test, p=0.01 5) (Birch-Machin and Krishnan 2001). The sizes of the most frequent duplications were 200 and 260 base pairs. Interestingly these same samples also contained high levels (>|%) of the 4977 bp common mtDNA deletion as determined by an established quantitative 3-primer PCR assay described in Example 6.

### EXAMPLE 3

### Mutation Fingerprint of mtDNA in Human NMSC and its Precursor Lesions

[0233] DNA was extracted from human skin tissue samples as described in Example 1, with the use of DNeasy™ by Qiagen Using specific primers, mtDNA is amplified by PCR and following DNA sample preparation (Qiagen), mutations are identified by automated sequencing (PE Applied Biosystems) using BigDye™ Terminator Cycle sequencing. This methodology is described in Healy et al. 2000; Harding et al. 2000. The entire 16,569 bp human mitochondrial genome is sequenced using established PCR primer pairs, which are known not to amplify pseudogenes, or other nuclear loci. Any putative DNA changes are confirmed by comparison to the revised “Cambridge” human mtDNA reference (Andrews et al. 1999). The sequences obtained from the tumour mtDNA are first compared for known polymorphisms (Andrews et al. 1999; MITOMAP) and then compared with the mtDNA sequence from the normal perilesional skin to identify genuine somatic mutations.

[0234] DHPLC is performed on the WAVE™ DNA Fragment Analysis System (Transgenomic, Omaha, USA) which provides a fully automated screening procedure. The same technology is used to screen for heteroplasmic mutations in the skin tumour mtDNA.

[0235] Using the back to back primer methodology described in Example 2, the pattern of DNA length mutations (i.e. tandem duplications) in the hypervariable segments of the non-coding region (NCR) are rapidly screened.

### EXAMPLE 4

### Deletion Spectrum of the Entire Mitochondrial Genome in Human NMSC and its Precursor Lesions

[0236] MtDNA damage in squamous cell carcinomas (SCCS), Basal cell carcinomas (BCCS) and putative precursor lesions such as Bowen's disease and actinic keratoses (As) was compared to adjacent perilesional skin taken from different sun-exposed body sites. A long-extension PCR technique (LX-PCR) (Ray et al. 1998) was used to amplify the entire mitochondrial genome in order to determine the whole deletion spectrum of mtDNA. A myriad of specific deletions have been observed to occur in the mitochondrial genome. Not all deletions will correlate with non-melanoma skin cancer; however, for an accurate diagnostic method, those deletions that are associated with the disease must be known.

[0237] DNA is extracted by use of a commercial kit (Qiangen) according to the manufacturer's recommendations. The entire mitochondrial genome is amplified in two separate reactions using the Expand TM Long Template PCR System™ (Boehringer Manheim, Switzerland). The PCR primers used are those described by Kleinle et al. (1997) covering the following regions of the Cambridge sequence (Andrews et al. 1999): DIA(nucleotides (nt) 336-363), DIB (nt 282-255), OLA (nt 5756-5781), and OLB (nt 5745-5781). These large products eliminate amplification of nuclear pseudogenes. The sequences of the primers are as follows:

| | |
|---|---|
| DIAF: (336-363) | |
| 5′ AACACATCTCTGCCAAACCCCAAAAACA 3′ | SEQ ID NO: 5 |
| OLBR: (5745-5721) | |
| 5′ CCGGCGGCGGGAGAAGTAGATTGAA 3′ | SEQ ID NO: 6 |
| OLAF: (5756-5781) | |
| 5′ GGGAGAAGCCCCGGCAGGTTTGAAGC 3′ | SEQ ID NO: 7 |
| DIBR: (282-255) | |
| 5′ ATGATGTCTGTGTGGAAAGTGGCTGTGC 3′ | SEQ ID NO: 8 |

[0238] Amplifications are performed in 50 microlitre reactions containing 16 pmol of each primer, 500 μmol dNTPs, 10×PCR buffer with 22.5 mM MgCl₂ and detergents(kit), 0.75 μl of enzyme (3.5×10³ units/ml) and 50-200 ng of total DNA. One reaction generates 11,095 bp segments of the genome, while another results in 5,409 bp lengths (e.g. Kleinle et al, 1997). The PCR amplification conditions consists of a denaturing stage at 93° C. for 1 min 30 s, followed by 10 cycles of 93° C. for 30 s, 60° C. for 30 s and 68° C. for 12 min, followed by a further 20 cycles of the same profile with an additional 5 s added to the elongation time every cycle. There is a final cycle of 93° C. for 30 s, 60° C. for 30 s and an elongation time of 68° C. for 26 minutes. To ensure reproducibility, a known amount of DNA is separated on a 1% agarose gel and only samples which have at least the same amount of DNA are included in the analysis.

[0239] A greater mean number of deletions is found with increasing UV exposure in the tumour samples, as shown in Table 2.

TABLE 2
Comparison of the mean number of deletions observed in the LX-PCR of mtDNA
between normal and tumour skin taken from different UV-exposed body sites.

| | Mean number of deletions in | Mean number of deletions in |
|---|---|---|
| UV exposure | adjacent normal epidermis | epidermal tumour |
| Constant (n = 5) | 1.0 | 3.6 |
| Intermittent (n = 2) | 0 | 1.5 |
| Sun-protected (n = 2) | 0 | 0 |

### EXAMPLE 5

### Aging and MtDNA

[0240] Using temporal maternal line comparisons (i.e. great-grandchild through great-grand parents), the entire sequence of mtDNA extracted from a given tissue is rapidly, and accurately sequenced, in order to definitively state the arrangement of nucleotide base pairs for that specific molecule and possible changes through time. These characterizations are compared to health status, aging indicators and between specific maternal lines, within larger populations. This combined information allows crucial statistical discrimination between separate causes resulting in the same mutation/deletion and establishes that the mtDNA sequences, used as a bio-marker, has the required index of specificity and sensitivity in order to establish its validity. In addition, the proportions of base pair deletions and mutations are compared for consistency in various tissues across the 4 maternal generations. Recent methodological developments have permitted detection of base pair deletions implicated in aging in blood samples (Bassam et al. 1991) and have raised the possibility that blood samples may be used to study mtDNA in lieu of skeletal muscle (von Wurmb et al. 1998). After establishing the efficacy of employing leukocytes in lieu of muscle tissue, as representative of mtDNA deletions and/or mutations, the next step measures only mtDNA in leukocytes. MtDNA deletions/mutations are then determined as previously described.

[0241] Skeletal muscle or leukocytes are obtained from a patient. DNA is extracted as set out in Example 1. The following primers were used:

| | |
|---|---|
| 12ST1: (1257-1279) | |
| 5′ TATACCGCCATCTTCAGCAAAC3′ | SEQ ID NO: 9 |
| 12ST2: (1433-1411) | |
| 5′ TACTGCTAAATCCACCTTCGAC 3′ | SEQ ID NO: 10 |
| D1F: | |
| 5′ CCTTACACTATTCCTCATCACC 3′ | SEQ ID NO: 11 |
| D1R: | |
| 5′ TGTGGTCTTTGGAGTAGAAACC 3′ | SEQ ID NO: 12 |

[0242] Amplifications were performed in 50 microlitre reactions containing 2.0 μmol of each primer, 250 μmol dNTPs, 10×PCR buffer(Thermopol Reaction Buffer), bovine serum albumin, 0.5 units Deep vent polymerase and 50-200 ng of total DNA. The PCR amplification conditions consists of a denaturing stage at 95° C. for 5 min (hot start), followed by 30 cycles of 94° C. for 30 s, 60° C. for 60 s and 72° C. for 30 s with a final extension at 72° C. for 10 min. Gel electrophoresis was performed on a 2% agarose gel at 125 volts for 60 min, stained with ethidium bromide, and visualized under UV light. To ensure reproducibility, a known amount of DNA was separated on a 2% agarose gel and only samples which have the same amount of DNA were included in the analysis.

### EXAMPLE 6

### Quantitative Detection of the 4977 bp Common mtDNA Deletion by 3-Primer PCR

[0243] Where appropriate the incidence of the common deletion is determined in a quantitative manner by a 3-primer PCR method which detects levels greater than 1-5% or a dilution PCR method which detects levels less than 1% down to 104%. (See Example 7) Samples are obtained and DNA extracted as described in Example 1. To simultaneously detect and quantify the ratios of both deleted and wild type (wt) mtDNAs in the DNA samples, a 3-primer PCR procedure is used (as described in Birch-Machin et al 1998). Primers A, and C correspond to heavy strand positions 13720-13705 and 9028-9008 respectively (Anderson et al., 1981); primer B corresponds to light strand positions 8273-8289. Primer C maps to a mtDNA region within the common deletion, whereas primers A and B flank the deleted region. Therefore primers B and C only amplify wt-mtDNAs and primers A and B only amplify deleted mtDNAs (the distance between the two primers in the absence of the deletion, approximately 5.5 kb, is too long to be amplified under our PCR conditions as described below). value of zero is obtained for both total mtDNA and deleted mtDNA and the corresponding dilution values are used to calculate the percentage of common deletion in the sample thus:

$$\% common deletion = \frac{total mtDNA dilution {factor}^{( IOD Zero )} \times 100}{common deletion dilution {factor}^{( IOD Zero )}}$$

### EXAMPLE 8

### Denaturing High Performance Liquid Chromatography (DHPLC)

[0244] Samples are obtained and DNA extracted as in Example 1. PCR in 13 overlapping fragments using two different PCR conditions as described by van den Bosch et al. (2000). The following three mtDNA specific primer pairs for PCR:

i. Oligo Sequence

| | | |
|---|---|---|
| Mt3118F | CCCTGTACGAAAGGACAAGAG | SEQ ID NO: 13 |
| Mt3334R | TGAGGAGTAGGAGGTTGG | SEQ ID NO: 14 |
| Mt8207F | CCCATCGTCCTAGAATTAATTCC | SEQ ID NO: 15 |
| Mt8400R | ATGGTGGGCCATACGGTAG | SEQ ID NO: 16 |
| Mt14427F | CCCATGCCTCAGGATACTCCTC | SEQ ID NO: 17 |
| Mt14997R | GCGTGAAGGTAGCGGATG | SEQ ID NO: 18 |

[0245] The 1-2 kb PCR products are digested into fragments of 90-600 bp and resolved at their optimal melting temperature. Mutations are represented as two peaks and mutations with low percentages, such as <2% heteroplasmy as a “shoulder” in the peak.

[0246] DHPLC is performed with a mobile phase consisting of two eluents (pH 7.0). Buffer A contains triethylammonium acetate (TEAA), which interacts with both the negatively charged phosphate groups on the DNA as well as the surface of the column. Buffer B contains TEAA with 25% of the denaturing agent acetonitrile. Fragments were eluted with a linear acetonitrile gradient at a constant flow rate. Increasing the concentration of acetonitrile will denature the fragments. Table 3 below is an example of a standard method for DHPLC of a PCR reaction generated using the WAVEMAKER software (Transgenomics) according to manufacturer's instructions.

[0247] Using three primers allowed the simultaneous detection of two bands, the larger one (755 bp) corresponding to the wt-mtDNA, and the smaller one (470 bp) corresponding to deleted mtDNA harbouring the ‘common deletion’. The PCR reaction mixture (25 μl total volume) contained 100 ng total cellular DNA, 200 μM dNTPs, 10 mM Tris-HCl (pH 8.8), 50 mM KCl, 1.5 mM Mg Cl₂, 0.1% Triton X-100, 2.5 U Taq DNA polymerase (BioTaq, BiolineUK Limited, London), 25 pmoles of primers A and B, 6.25 pmoles of primer C and 3 μCi of [α-³²P]-dATP. The PCR conditions were 25 cycles of 94° C. at 1 minute, 55° C. at 1 minute, 72° C. at 2 minutes including a final extension of 15 minutes at 72° C. These PCR products were then electrophoresed through a 6% nondenaturing polyacrylamide gel and the radioactive PCR fragments were quantified by phophorimage analysis using the ImageQuant™ software (Molecular Dynamics, Chesham UK).

### EXAMPLE 7

### Serial Dilution PCR Method to Quantitatively Detect Low Levels (<1%) of the Common mtDNA Deletion

[0248] A semi-quantitative PCR method (Corral-Debrinski et al 1991) is used to estimate the proportion of the common deletion in the total mtDNA extracted from the tissue/cell samples. Biological samples are obtained and DNA extracted as described in Example 1. The DNA sample is initially linearised using the restriction enzyme Bam Hi (1 μl enzyme and 1 μl of commercially supplied buffer) at 37° C. for 90 minutes. Serial dilutions are performed in two-fold steps (for total mtDNA there was an initial 10-fold dilution) and PCR performed for each dilution (1 μl) using the following primers:
[0249] Primers for total mtDNA
[0250] L3108 (nt3108-3127)
[0251] H3717 (nt3717-3701)
[0252] Primers for Common Deletion
[0253] L8282 (nt8282-8305)
[0254] H13851(nt13851-13832)

[0255] The reaction conditions are as follows:

[0256] One cycle 94° C. for 2 minutes, 34 cycles of 94° C. for 45 seconds, 51° C. for 30 seconds (total mtDNA), 56° C. for 30 seconds (common deletion), 72° C. for 1 minute and one final cycle of 72° C. for 8 minutes. All PCR reactions are carried out in the following mixture (50 μl): Sample DNA 1 μl, 0.6 μM forward primer, 0.6 μM reverse primer, 0.2 mM dNTP's, 5 μl GeneAmp® 10×PCR Buffer, (Perkin Elmer), 0.21 μl Amplitaq® DNA polymerase (Perkin Elmer), 35.75 μl sterile autoclaved double distilled water.

[0257] Following electrophoresis the PCR productes are visualised on a UV transilluminator (TMW-20, Flowgen Ltd., Lichfield, UK) and a digital image of the gel obtained using image acquisition apparatus (Alpha Imager 2000, Alpha Innotech Corporation, supplied by Flowgen Ltd., Lichfield, UK). The associated image analysis software (Alpha Ease v3.3, Alpha Innotech Corp.) allows the calculation of the integrated optical density (IOD) for each PCR product in a dilution series. The band where an IOD

TABLE 3
Standard Method for DHPLC

| | | | | MI/min |
|---|---|---|---|---|
| Step | Time | % A (buffer) | % B (buffer) | (flow rate) |
| Loading | 0.0 | 52 | 48 | 0.90 |
| Start Gradient | 0.1 | 47 | 53 | |
| Stop Gradient | 4.1 | 39 | 61 | |
| Start Clean | 4.2 | 0 | 100 | |
| Stop Clean | 4.7 | 0 | 100 | |
| Start Equilibrate | 4.8 | 52 | 48 | |
| Stop Equilibrate | 6.8 | 52 | 48 | |

[0258] The temperatures for successful resolution of the various heteroduplexes are detailed below and can simply be substituted into the relevant places in Table 2:

| Fragment | Melting temp (° C.) | Gradient of % Buffer B |
|---|---|---|
| Mt3118F | 59 | 51-59 |
| Mt8207F | 58 | 50-58 |
| Mt14427F | 56 | 60-68 |

### EXAMPLE 9

[0259] An extensive survey of mtDNA D-loop sequences from 49 prostate needle biopsy patients (46 diagnosed with malignancy) demonstrated mtDNA mutations in all prostatic tissues inclusive of benign prostatic hyperplasia (BPH), available Gleason grades and stroma as compared with the mitochondrial DNA of the patients blood. Moreover, an expanded study of mitochondrial genomes from 31 prostatectomy patients demonstrates equivocable hyper-mutation (Chen et al. 2002; Chen et al. 2003) loads in matched malignant glands, adjacent benign glands (nearby the malignant glands), and distal benign glands (located in tissue free of malignant pathology removed from any malignant pathology) as shown in Table 4. The mutations of Table 4 are also provided in SEQ ID No: 102 which lists the substitutions, SEQ ID NOs: 103 to 109 which lists the deletions, and SEQ ID No: 110 to 138 which lists the insertions. Polymorphisms and mutation positions were determined by comparison to the Revised Cambridge Reference Sequence (2001), however the historical numbering has been maintained such that the deletion at position 3106 is denoted as a gap and the rare polymorphism 750A has been retained. The numbering of the bases is based on the revised Cambridge Reference Sequence having a total of 16569 base positions. A histogram showing the number of mutations per location of the mitochondrial genome is shown in FIG. 1. As can be seen in FIG. 1, the mutations were found throughout the mtDNA genome and in all diseased prostates. However, certain “hot spots” were also apparent, for example in the D-loop region and the 16s region. These data sets imply that the designation of malignant or benign tissue, as made by a qualified pathologist using routine histological methods and grading standards, does not identify early disease progression. This strongly suggests that malignant transformation begins at the cellular level before the morphological characteristics of a cell are altered. Importantly, the mutation patterns are completely inconsistent for matched prostate tissue from an individual patient, or in comparison to another patient, perhaps indicating possible tissue sites where clonal expansion of malignant cells may occur. Moreover, separate needle biopsies with the same Gleason score, from the same individual almost always demonstrate alternative mtDNA mutation patterns. This indicates that total mutation load rather than specific mutation sites may be more representative of the disease and progression of the disease.

[0260] Since this data was gathered from individuals with known prostate cancer, and in the prostatectomy group with known advanced staging, it is likely that histologically benign tissue has undergone some intracellular transformation(s) associated with neoplasia and possible progression towards malignancy. Benign tissue harboring mtDNA mutations serve as a “biosensor” which can be monitored for increasing mutations indicative of the rate of disease progression. This rate may also indicate tumour aggression. Moreover, the effectiveness of a specific therapy could also be monitored based on the change in this mutational pattern.

[0261] This technique may be used as a confirmatory test for benign needle biopsies. Currently when a patient has a needle biopsy performed on the prostate and the tissue looks histologically benign he is sent home and is usually scheduled for follow-up needle biopsies in six months. Use of the above method would examine the already taken needle biopsy tissue and either confirm that the tissue is benign on the molecular level as well, or find evidence that there is in fact a malignancy in the prostate that was geographically missed by the needle biopsy technique, or that the tissue is pre-neoplastic or neoplastic at the molecular level. This could potentially save a lot of people from undergoing multiple surgeries or allow for early preventative treatment.

TABLE 4*
Base Mutations: Observed mutations of homoplasmic to homoplasmic,
homoplasmic to heteroplasmic, and heteroplasmic to homoplasmic

| | BP | | | | | BP | | | |
|---|---|---|---|---|---|---|---|---|---|
| | eliminating | | | | | eliminating | | | |
| BP | position | | | | BP | position | | | |
| Historical | gap at | Homo- | Homo- | Hetero- | Historical | gap at | Homo- | Homo- | Hetero- |
| Numbering** | 3106 | Homo | Hetero | Homo | Numbering** | 3106 | Homo | Hetero | Homo |
| 10 | 10 | T-C | T-T/C | | 200 | 200 | A-G | A-A/G | |
| 31 | 31 | | C-C/T | | 204 | 204 | T-C | T-T/C | |
| | | | | | | | | C-C/T | |
| 41 | 41 | C-T | C-C/T | | 205 | 205 | | A-A/G | |
| 55 | 55 | C-T | | | 207 | 207 | | A-A/G | |
| 57 | 57 | A-T | | | | | G-A | G-G/A | |
| 61 | 61 | | C-C/T | | 208 | 208 | | T-T/C | |
| 64 | 64 | C-T | | | 214 | 214 | | A-A/G | |
| 72 | 72 | C-T | C-C/T | | 217 | 217 | C-T | | |
| | | T-C | T-T/C | | 222 | 222 | C-T | | |
| 73 | 73 | A-G | A-A/G | | 225 | 225 | A-G | A-A/G | |
| 81.1 | 81.1 | INS T | | | 226 | 226 | C-T | C-C/T | |
| 93 | 93 | | G-G/A | | 228 | 228 | A-G | A-A/G | |
| 94 | 94 | | A-A/G | | | | | G-G/A | |
| 104 | 104 | | C-C/T | | 229 | 229 | G-T | | |
| 113 | 113 | | C-C/T | | 234 | 234 | | A-A/G | |
| 119 | 119 | | C-C/T | | 235 | 235 | A-G | | |
| 128 | 128 | C-T | | | | | | G-G/A | |
| 146 | 146 | C-T | C-C/T | | 239 | 239 | T-C | | |
| | | T-C | T-T/C | | 247 | 247 | | G-G/A | |
| 150 | 150 | C-T | C-C/T | | 248 | 248 | DEL A | | |
| | | T-C | T-T/C | | 262 | 262 | | C-C/T | |
| 152 | 152 | C-T | C-C/T | | 263 | 263 | | G-G/T | |
| | | T-C | T-T/C | | | | A-G | A-A/G | |
| 153 | 153 | A-G | A-A/G | | 264 | 264 | T-C | | |
| | | G-A | G-G/A | | 277 | 277 | | C-C/T | |
| 170 | 170 | | C-C/T | | 280 | 280 | | C-C/T | |
| 182 | 182 | C-T | C-C/T | | 295 | 295 | T-C | T-T/C | |
| 185 | 185 | G-A | G-G/A | | 297 | 297 | G-A | G-G/A | |
| | | | A-A/G | | 303.1 | 303.1 | INS C | | |
| | | | G-G/T | | 303.2 | 303.2 | INS C | | |
| 188 | 188 | A-G | | | 305 | 305 | | C-C/T | |
| | | G-A | G-G/A | | 309 | 309 | | T-T/C | |
| 189 | 189 | A-G | A-A/G | | | | | C-C/T | |
| | | G-A | G-G/A | | 309 | 309 | DEL C | | |
| 192 | 192 | T-C | | | 309.1 | 309.1 | INS C | | |
| 194 | 194 | T-C | T-T/C | | 309.2 | 309.2 | INS C | | |
| | | C-T | | | 309.3 | 309.3 | INS C | | |
| 195 | 195 | C-T | C-C/T | | 310 | 310 | DEL C | T-T/C | T/C-T |
| | | | T-T/C | | | | DEL T | C-C/T | |
| 196 | 196 | T-C | | | 311 | 311 | | C-C/T | |
| 198 | 198 | | C-C/T | | 311.1 | 311.1 | INS C | | |
| 199 | 199 | | T-T/C | | 312 | 312 | | C-C/T | |
| | | | C-C/T | | 313 | 313 | | C-C/T | |
| 200 | 200 | G-A | G-G/A | | | | | | |
| 315.1 | 315.1 | INS C | | | 1719 | 1719 | | A-A/G | A/G-A |
| 315.2 | 315.2 | INS C | | | 1761 | 1761 | | | A/T-A |
| 323 | 323 | | G-G/A | | 1766 | 1766 | | | C/T-T |
| 325 | 325 | C-T | C-C/T | | 1811 | 1811 | G-A | G-G/A | |
| 329 | 329 | G-T | | | 1842 | 1842 | | | A/G-A |
| 394 | 394 | | C-C/T | | 1883 | 1883 | | | A/G-G |
| 416.1 | 416.1 | INS G/A | | | 1888 | 1888 | G-A | G-G/A | A/G-G |
| 419 | 419 | | A-A/G | | | | | | A/G-A |
| 456 | 456 | C-T | | | 2005 | 2005 | | | C/T-C |
| | | | T-T/C | | 2056 | 2056 | | | A/G-G |
| 462 | 462 | T-C | | | 2068.1 | 2068.1 | INS A | | |
| 465 | 465 | | T-T/C | | 2075 | 2075 | | | T/G-T |
| 468 | 468 | | C-C/T | | 2257 | 2257 | | | C/T-C |
| 477 | 477 | C-T | | | 2258 | 2258 | | | A/G-A |
| 481 | 481 | C-T | C-C/T | | 2259 | 2259 | T-C | | |
| 482 | 482 | C-T | | | 2261 | 2261 | | C-C/T | |
| 489 | 489 | C-T | C-C/T | | 2280 | 2280 | | | C/T-C |
| 497 | 497 | T-C | T-T/C | | 2351 | 2351 | | | C/T-T |
| 499 | 499 | A-G | | | 2352 | 2352 | | | C/T-T |
| 501 | 501 | | C-C/T | | 2357 | 2357 | | | C/T-C |
| 505 | 505 | | C-C/T | | 2359 | 2359 | | | C/T-C |
| 506 | 506 | | | C/T-C | 2389 | 2389 | | | C/T-C |
| 508 | 508 | G-A | | | 2596 | 2596 | | G-G/A | |
| 513 | 513 | A-G | | | 2627 | 2627 | | G-G/A | |
| 513 | 513 | DEL A | | | 2657 | 2657 | C-T | | |
| 514.1 | 514.1 | INS C | | | 2683 | 2683 | | C-C/T | |
| 515 | 515 | | A-A/G | | 2689 | 2689 | | C-C/T | |
| 515 | 515 | DEL A | | | 2706 | 2706 | A-G | A-A/G | |
| 515.1 | 515.1 | INS A | | | 2761 | 2761 | C-T | | |
| 517 | 517 | | T-T/A | | 2857 | 2857 | | C-C/T | |
| 523 | 523 | | A-A/G | | 2885 | 2885 | | C-C/T | |
| 523 | 523 | DEL A | | | 2927 | 2927 | C-T | | |
| 523.1 | 523.1 | INS C | | | 2948 | 2948 | C-T | | |
| 523.2 | 523.2 | INS A | | | 2952 | 2952 | | | C/T-T |
| 523.3 | 523.3 | INS C | | | 3010 | 3010 | A-G | A-A/G | |
| 523.4 | 523.4 | INS A | | | | | | | |
| 533 | 533 | A-G | A-A\G | | 3013 | 3013 | | G-G/A | |
| 536 | 536 | | C-C/T | | 3036 | 3036 | | | A/G-G |
| 567.1 | 567.1 | INS C | | | 3040 | 3040 | | | A/G-G |
| 568.1 | 568.1 | INS C | | | 3046 | 3046 | | | C/T-C |
| 568.2 | 568.2 | INS C | | | | | | | |
| 709 | 709 | | A-A/G | | 3308 | 3307 | | T-T/C | |
| | | | G-G/A | | 3338 | 3337 | | | C/T-T |
| 785 | 785 | | C-C/G | | 3349 | 3348 | | | A/G-A |
| 857 | 857 | G-C | | | 3394 | 3393 | C-T | | |
| 909 | 909 | | G-G/A | | 3398 | 3397 | T-C | | |
| 1189 | 1189 | | C-C/T | | 3469.1 | 3468.1 | INS T | | |
| 1247 | 1247 | | G-G/A | | 3480 | 3479 | G-A | | |
| 1431 | 1431 | | G-G/A | | 3499 | 3498 | | | A/G-A |
| 1693 | 1693 | C-T | | | 3507 | 3506 | C-A | | |
| 1709 | 1709 | | | A/G-G | 3589 | 3588 | | C-C/T | |
| 1719 | 1719 | | | A/G-G | 3594 | 3593 | | C-C/T | |
| 3657 | 3656 | C-T | | | 5663 | 5662 | | C-C/T | |
| 3666 | 3665 | G-A | | | 5677 | 5676 | C-T | | |
| 3688 | 3687 | | G-G/A | | 5882 | 5881 | | C-C/T | |
| 3693 | 3692 | | G-G/A | | 5897 | 5896 | | C-C/T | |
| 3744.1 | 3743.1 | INS T | | | 5984 | 5983 | A-G | A-A/G | |
| 3908 | 3907 | C-T | | | 5985 | 5984 | | A-A/G | |
| 3966 | 3965 | | C-C/T | | 5999 | 5998 | C-T | | |
| 3969 | 3968 | C-T | | | 6009 | 6008 | | C-C/T | |
| 3992 | 3991 | C-T | | | 6028 | 6027 | | | A/G-G |
| 4017 | 4016 | C-T | | | 6037 | 6036 | | G-G/A | |
| 4185 | 4184 | C-T | | | 6041 | 6040 | | C-C/T | |
| 4216 | 4215 | T-C | T-T/C | | 6047 | 6046 | G-A | | |
| 4217 | 4216 | | A-A/G | | 6059 | 6058 | | C-C/T | |
| 4239 | 4238 | C-T | | | 6147 | 6146 | C-T | | |
| 4418 | 4417 | | C-C/T | | 6219 | 6218 | | C-C/T | |
| 4561 | 4560 | C-T | | | 6221 | 6220 | | C-C/T | |
| 4569 | 4568 | | G-G/A | | 6224 | 6223 | | C-C/T | |
| 4580 | 4579 | | A-A/G | | 6307 | 6306 | | A-A/G | |
| 4591 | 4590 | | T-T/C | | 6314 | 6313 | | C-C/T | |
| 4646 | 4645 | C-T | | | 6382 | 6381 | G-A | | |
| 4655 | 4654 | | A-A/G | | 6548 | 6547 | | C-C/T | |
| 4703 | 4702 | | C-C/T | | 6553 | 6552 | | C-C/T | |
| 4716 | 4715 | | C-C/T | | 6557 | 6556 | | C-C/T | |
| 4722 | 4721 | | A-A/G | | 6579 | 6578 | G-A | | |
| 4733 | 4732 | | C-C/T | | 6643 | 6642 | | T-T/C | |
| 4735 | 4734 | | C-C/T | | 6667 | 6666 | | C-C/T | |
| 4787 | 4786 | G-A | G-G/A | | 6686 | 6685 | T-C | | |
| 4826 | 4825 | | C-C/T | | 6691 | 6690 | G-A | | |
| 4864 | 4863 | | C-C/T | | 6776 | 6775 | C-T | C-C/T | |
| 4892 | 4891 | | C-C/T | | | | T-C | T-T/C | |
| 4917 | 4916 | A-G | A-A/G | | 6827 | 6826 | | T-T/C | |
| | | | G-G/A | | 6912 | 6911 | | G-G/A | |
| 4951 | 4950 | | C-C/T | | 6917.1 | 6916.1 | INS T | | |
| 5036 | 5035 | | A-A/G | | 6953 | 6952 | G-A | | |
| 5046 | 5045 | | G-G/A | | 6989 | 6988 | | A-A/G | |
| 5102 | 5101 | | A-A/G | | 7007 | 7006 | C-T | | |
| 5147 | 5146 | G-A | G-G/A | | 7013 | 7012 | | G-G/A | |
| | | | A-A/G | | 7028 | 7027 | C-T | C-C/T | |
| 5174 | 5173 | | C-C/T | | | | | T-T/C | |
| 5198 | 5197 | | G-G/A | | 7055 | 7054 | | A-A/G | |
| 5213 | 5212 | | C-C/T | | 7059 | 7058 | | G-G/A | |
| 5300 | 5299 | | C-C/T | | 7146 | 7145 | | A-A/G | |
| 5312 | 5311 | | C-C/T | | 7159 | 7158 | | T-T/C | |
| 5371 | 5370 | | C-C/T | | 7184 | 7183 | G-A | G-G/A | |
| 5424 | 5423 | | C-C/T | | 7256 | 7255 | | C-C/T | |
| 5440 | 5439 | | C-C/T | | 7309 | 7308 | | T-T/C | |
| 5456 | 5455 | | C-C/T | | 7389 | 7388 | | T-T/C | |
| 5593 | 5592 | | T-T/C | | 7406.1 | 7405.1 | INS C | | |
| 5633 | 5632 | | T-T/C | | 7407 | 7406 | T-C | T-T/C | |
| 5650 | 5649 | | G-G/A | | 7412 | 7411 | | | (C/T)/(C/T) |
| 5655 | 5654 | | T-C/T | | 7476 | 7475 | | T-T/C | |
| 5656 | 5655 | A-G | A-A/G | | 7521 | 7520 | | G-G/A | |
| 7756 | 7755 | | C-C/T | | 10295 | 10294 | | G-G/A | |
| 7763 | 7762 | | G-G/A | | 10345 | 10344 | | T-T/C | |
| 7768 | 7767 | G-A | A-A/G | | 10355 | 10354 | | C-C/T | |
| 7815 | 7814 | | C-C/T | | 10439 | 10438 | | C-C/T | |
| 7867 | 7866 | | C-C/T | | 10455 | 10454 | | G-G/A | |
| 7897 | 7896 | G-A | | | 10463 | 10462 | T-C | T-T/C | |
| 8027 | 8026 | G-A | | | | | | | |
| 8065 | 8064 | | | G/A-G | 10550 | 10549 | | G-G/A | |
| 8117 | 8116 | | C-C/T | | 10679 | 10678 | G-A | | |
| 8133 | 8132 | | C-C/T | | 10685 | 10684 | | A-A/G | |
| 8248 | 8247 | | A-A/G | | 10688 | 10687 | | G-G/A | |
| 8270 | 8269 | C-T | C-C/T | | 10754 | 10753 | A-C | | |
| 8426.1 | 8425.1 | INS G | | | 10810 | 10809 | T-C | T-T/C | |
| 8468 | 8467 | | C-C/T | | 10819 | 10818 | | G-G/A | |
| 8616 | 8615 | | A-A/G | | 10873 | 10872 | | C-C/T | |
| 8655 | 8654 | | C-C/T | | | | T-C | T-T/C | |
| 8697 | 8696 | G-A | G-G/A | | 10882 | 10881 | C-T | | |
| 8701 | 8700 | | A-A/G | | 10885 | 10884 | C-T | | |
| 8718 | 8717 | A-G | | | 10944 | 10943 | | C-C/T | |
| 8818 | 8817 | | T-T/C | | 10956 | 10955 | | X-C/T | |
| 8893 | 8892 | A-T | | | 10972 | 10971 | G-A | G-G/A | |
| 8903 | 8902 | | C-C/T | | 10975 | 10974 | | C-C/T | |
| 9055 | 9054 | A-G | | | 10978 | 10977 | | A-A/G | |
| 9093 | 9092 | | G-G/A | | 9667 | 9666 | G-A | | |
| 9132 | 9131 | A-G | | | 9696 | 9695 | | C-C/T | |
| 9163 | 9162 | A-G | A-A/G | | 9698 | 9697 | C-T | C-C/T | |
| 9313 | 9312 | | A-A/G | | 9716 | 9715 | C-T | | |
| | | | A-A/C | | 9767 | 9766 | C-T | | |
| 9327 | 9326 | | A-A/G | | 9778 | 9777 | | G-G/A | |
| 9352 | 9351 | | C-C/T | | 9899 | 9898 | C-T | | |
| 9405 | 9404 | | T-T/C | | 10143 | 10142 | A-G | | |
| 9413 | 9412 | | T-T/C | | 10295 | 10294 | | G-G/A | |
| 9419 | 9418 | | C-C/T | | 10345 | 10344 | | T-T/C | |
| 9445 | 9444 | | G-G/A | | 10355 | 10354 | | C-C/T | |
| 9477 | 9476 | G-A | G-G/A | | 10439 | 10438 | | C-C/T | |
| 9502 | 9501 | G-A | | | 10455 | 10454 | | G-G/A | |
| 9540 | 9539 | | C-C/T | | 10463 | 10462 | T-C | T-T/C | |
| 9548 | 9547 | A-G | | | | | | | |
| 9554 | 9553 | | G-G/A | | 10550 | 10549 | | G-G/A | |
| 9559 | 9558 | | C-C/T | | 10679 | 10678 | G-A | | |
| 9564 | 9563 | | G-G/A | | 10685 | 10684 | | A-A/G | |
| 9574 | 9573 | | C-C/T | | 10688 | 10687 | | G-G/A | |
| 9591 | 9590 | | G-G/C | | 10754 | 10753 | A-C | | |
| 9628 | 9627 | | G-G/A | | 10810 | 10809 | T-C | T-T/C | |
| 9667 | 9666 | G-A | | | 10819 | 10818 | | G-G/A | |
| 9696 | 9695 | | C-C/T | | 10873 | 10872 | | C-C/T | |
| 9698 | 9697 | C-T | C-C/T | | | | T-C | T-T/C | |
| 9716 | 9715 | C-T | | | 10882 | 10881 | C-T | | |
| 9767 | 9766 | C-T | | | 10885 | 10884 | C-T | | |
| 9778 | 9777 | | G-G/A | | 10944 | 10943 | | C-C/T | |
| 9899 | 9898 | C-T | | | 10956 | 10955 | | X-C/T | |
| 10143 | 10142 | A-G | | | 10972 | 10971 | G-A | G-G/A | |
| 10975 | 10974 | | C-C/T | | 13398 | 13397 | | A-A/G | |
| 10978 | 10977 | | A-A/G | | 13431 | 13430 | | C-C/T | |
| 11001 | 11000 | | A-A/G | | 13436 | 13435 | | C-C/T | |
| 11013 | 11012 | | X-C/T | | 13468 | 13467 | | C-C/T | |
| 11024 | 11023 | | T-T/C | | 13476 | 13475 | | A-A/G | |
| | | | C-C/T | | 13484 | 13483 | | T-T/C | |
| 11069 | 11068 | | A-A/G | | 13487 | 13486 | | C-C/T | |
| 11084 | 11083 | | A-A/G | | 13506 | 13505 | | C-C/T | |
| 11113 | 11112 | T-C | T-T/C | | 13530 | 13529 | | C-C/T | |
| 11177 | 11176 | | C-C/T | | 13536 | 13535 | | C-C/T | |
| 11180 | 11179 | | G-G/T | | 13563 | 13562 | | A-A/G | |
| 11195 | 11194 | | G-G/A | | 13573 | 13572 | | C-C/T | |
| 11217 | 11216 | | C-C/T | | 13579 | 13578 | G-A | | |
| 11251 | 11250 | A-G | A-A/G | | 13609 | 13608 | | C-C/T | |
| | | G-A | G-G/A | | | | | T-T/C | |
| 11299 | 11298 | C-T | C-C/T | | 13617 | 13616 | C-T | C-C/T | |
| 11332 | 11331 | | T-T/C | | | | T-C | T-T/C | |
| 11337 | 11336 | | G-A/G | | 13634 | 13633 | | G-G/A | |
| 11351 | 11350 | | G-A/G | | 13650 | 13649 | | C-C/T | |
| 11356 | 11355 | | T-T/C | | 13621 | 13620 | | | T/C-C |
| 11377 | 11376 | | A-A/G | | 13631 | 13630 | | C-C/T | |
| 11420 | 11419 | | G-G/A | | 13637 | 13636 | | G-G/A | |
| 11647 | 11646 | C-T | | | 13638 | 13637 | | A-A/G | |
| 11719 | 11718 | G-A | G-G/A | | 13651 | 13650 | | A-A/G | |
| 11812 | 11811 | A-G | A-A/G | | 13655 | 13654 | | T-T/C | |
| 11852 | 11851 | | G-G/A | | 13674 | 13673 | C-T | | |
| | | | | | 13674 | 13673 | DEL C | | |
| 11857 | 11856 | | C-C/T | | 13680 | 13679 | | T-T/C | |
| 11864 | 11863 | C-T | C-C/T | | 13687 | 13686 | | C-C/T | |
| 11881 | 11880 | | C-C/T | | 13707 | 13706 | | G-G/A | |
| 11907 | 11906 | | T-T/C | | 13708 | 13707 | | A-A/G | |
| 11914 | 11913 | | G-G/A | | | | | G-G/A | |
| 12012 | 12011 | | C-C/T | | 13711 | 13710 | | G-G/A | |
| 12013 | 12012 | | | A/G-A | 13712 | 13711 | | C-C/T | |
| 12308 | 12307 | | G-G/A | | 13725 | 13724 | | C-C/T | |
| 12372 | 12371 | | G-G/A | | 13731 | 13730 | | A-A/G | |
| | | | A-A/G | | 13734 | 13733 | | C-C/T | |
| 12492 | 12491 | | T-T/A | | 13743 | 13742 | | T-T/C | |
| 12624 | 12623 | C-T | | | 13748 | 13747 | | A-A/G | |
| 12633 | 12632 | A-C | A-A/C | | 13759 | 13758 | | G-G/A | |
| 12654 | 12653 | | G-G/A | | | | | A-A/G | |
| 12810 | 12809 | | G-G/A | | 13766 | 13765 | | C-C/T | |
| 12959 | 12958 | | C-C/T | | 13788 | 13787 | | C-C/T | |
| 13079 | 13078 | | | A/G-A | 13789 | 13788 | | T-T/C | |
| 13089 | 13088 | T-A | | | 13805 | 13804 | | C-C/T | |
| 13105 | 13104 | | A-A/G | | 13841 | 13840 | | T-T/C | |
| 13111 | 13110 | T-C | | | 13880 | 13879 | | C-C/A | |
| 13212 | 13211 | | C-C/T | | 13888 | 13887 | X-T | X-C/T | |
| 13281 | 13280 | | T-T/C | | 13911 | 13910 | | G-G/A | |
| 13294 | 13293 | | A-A/G | | 13933 | 13932 | | A-A/G | |
| 13359 | 13358 | | G-G/A | | 14025 | 14024 | | C-C/T | |
| 13368 | 13367 | G-A | G-G/A | | 14044 | 14043 | | C-C/T | |
| | | A-G | A-A/G | | 14135 | 14134 | | T-T/A | |
| 14139 | 14138 | | G-G/A | | 15889 | 15888 | | T-T/C | |
| 14167 | 14166 | | T-T/C | | 15904 | 15903 | T-C | T-T/C | |
| 14178 | 14177 | | T-T/C | | | | | C-A/C | |
| 14182 | 14181 | T-C | T-T/C | | 15907 | 15906 | | G-G/A | |
| 14203 | 14202 | | A-A/G | | 15927 | 15926 | A-G | | |
| 14220 | 14219 | X-G | X-G/A | | 15928 | 15927 | A-G | A-A/G | |
| 14233 | 14232 | A-G | A-A/G | | | | G-A | G-G/A | |
| 14281 | 14280 | T-C | T-T/C | | 15998 | 15997 | | | A/T-A |
| | | | C-C/T | | 15999.1 | 15998.1 | INS T | | |
| 14899 | 14898 | | G-G/A | | 16048 | 16047 | | G-G/A | |
| 14903 | 14902 | G-A | X-A/G | | 16051 | 16050 | | A-A/G | |
| 14918 | 14917 | | G-G/A | | | | | G-G/A | |
| 15043 | 15042 | | G-G/A | | 16063 | 16062 | | C-C/T | |
| 15115 | 15114 | | T-T/C | | 16067 | 16066 | | C-C/T | |
| 15162 | 15161 | | C-C/T | | 16069 | 16068 | | C-C/T | |
| 15218 | 15217 | G-A | G-G/A | | 16093 | 16092 | X-C | T-T/C | |
| 15244 | 15243 | | G-G/A | | | | C-T | C-C/T | |
| 15265 | 15264 | | C-C/T | | 16095 | 16094 | C-T | C-C/T | |
| 15286 | 15285 | | C-C/T | | 16111 | 16110 | | T-T/C | |
| 15301 | 15300 | | A-A/G | | 16126 | 16125 | T-C | T-T/C | |
| 15302 | 15301 | | C-C/T | | | | | C-C/T | |
| 15307 | 15306 | | C-C/T | | 16129 | 16128 | G-A | G-G/A | |
| 15323 | 15322 | A-G | A-A/G | | 16134 | 16133 | | C-C/T | |
| | | | G-G/A | | 16148 | 16147 | | C-C/T | |
| 15324 | 15323 | | C-C/T | | 16153 | 16152 | | A-A/G | |
| 15343 | 15342 | X-C | X-C/T | | 16163 | 16162 | | G-G/A | |
| 15355 | 15354 | X-A | X-A/G | | 16172 | 16171 | | C-C/T | |
| 15379 | 15378 | | C-C/T | | 16184 | 16183 | C-T | C-C/T | |
| 15384 | 15383 | X-C | X-C/T | | | | T-C | | |
| 15429 | 15428 | | A-A/G | | 16186 | 16185 | | T-T/C | |
| 15452 | 15451 | C-A | C-C/A | | 16189 | 16188 | T-C | T-T/C | |
| | | A-C | A-A/C | | | | C-T | C-C/T | |
| 15523 | 15522 | | C-C/T | | 16190 | 16189 | T-C | | |
| 15525 | 15524 | | G-G/A | | 16192 | 16191 | | C-C/T | |
| 15526 | 15525 | | C-C/T | | | | T-C | T-T/C | |
| 15527 | 15526 | | C-C/T | | 16209 | 16208 | | C-C/T | |
| 15557 | 15556 | | G-G/A | | | | | T-T/C | |
| 15587 | 15586 | | C-C/T | | 16223 | 16222 | | T-T/C | |
| 15607 | 15606 | A-G | A-A/G | | | | C-T | | |
| | | G-A | G-G/A | | 16224 | 16223 | C-T | C-C/T | |
| 15670 | 15669 | | C-C/T | | | | | T-T/C | |
| 15693 | 15692 | C-T | C-C/T | | 16225 | 16224 | C-T | | |
| 15698 | 15697 | | C-C/T | | 16235 | 16234 | | A-A/G | |
| 15704 | 15703 | | C-C/A | | 16239 | 16238 | C-T | C-C/T | |
| 15708 | 15707 | | G-G/T | | | | X-C | | |
| 15762 | 15761 | | G-G/A | | 16247 | 16246 | | G-G/A | |
| 15812 | 15811 | | A-A/G | | 16256 | 16255 | | T-T/C | |
| 15826.1 | 15825.1 | INS G | | | | | | C-C/T | |
| 15834 | 15833 | | T-T/C | | 16270 | 16269 | C-T | C-C/T | |
| 15865 | 15864 | | A-A/G | | 16292 | 16291 | | C-C/T | |
| 15884 | 15883 | C-G | G-C/G | | 16294 | 16293 | C-T | C-C/T | |
| | | | A-A/G | | 16296 | 16295 | C-T | C-C/T | |
| 16270 | 16269 | T-C | T-T/C | | 16544 | 16543 | | T-T/C | |
| | | | C-C/T | | | | | | |
| 16278 | 16277 | T-C | | | | | | | |
| 16280 | 16279 | | A-A/G | A/G-A | | | | | |
| 16290 | 16289 | | C-C/T | | | | | | |
| | | | T-T/C | | | | | | |
| 16291 | 16290 | | C-C/T | | | | | | |
| 16292 | 16291 | | T-T/C | | | | | | |
| 16293 | 16292 | | A-A/G | | | | | | |
| 16294 | 16293 | | T-T/C | | | | | | |
| | | C-T | C-C/T | | | | | | |
| 16295 | 16294 | | C-C/T | | | | | | |
| 16296 | 16295 | C-T | C-C/T | | | | | | |
| | | | T-T/C | | | | | | |
| 16298 | 16297 | C-T | C-C/T | | | | | | |
| 16303 | 16302 | | G-G/T | | | | | | |
| 16304 | 16303 | | T-T/C | | | | | | |
| | | C-T | C-C/T | | | | | | |
| 16311 | 16310 | C-T | C-C/T | | | | | | |
| | | T-C | T-T/C | | | | | | |
| 16319 | 16318 | G-A | G-G/A | | | | | | |
| | | | T-T/C | | | | | | |
| | | | A-A/G | | | | | | |
| 16320 | 16319 | | T-T/C | | | | | | |
| 16325 | 16324 | | C-C/T | | | | | | |
| 16344 | 16343 | C-G | | | | | | | |
| 16356 | 16355 | | C-C/T | | | | | | |
| 16342 | 16341 | C-T | C-C/T | | | | | | |
| 16352 | 16351 | | T-T/C | | | | | | |
| 16353 | 16352 | | C-C/T | | | | | | |
| 16354 | 16353 | | T-T/C | | | | | | |
| 16355 | 16354 | | T-T/C | | | | | | |
| 16359.1 | 16358.1 | INS G | | | | | | | |
| 16360 | 16359 | | C-C/T | | | | | | |
| 16362 | 16361 | | C-C/T | | | | | | |
| | | | T-T/C | | | | | | |
| 16370 | 16369 | | G-G/A | | | | | | |
| 16389 | 16388 | | G-G/A | | | | | | |
| 16390 | 16389 | X-G | X-G/A | | | | | | |
| 16398 | 16397 | A-G | | G/A-G | | | | | |
| 16399 | 16398 | G-A | | G/A-A | | | | | |
| 16429 | 16428 | | X-T/C | | | | | | |
| 16465 | 16464 | C-T | C-C/T | | | | | | |
| | | T-C | T-T/C | | | | | | |
| 16475 | 16474 | | T-T/C | | | | | | |
| 16514 | 16513 | | C-C/T | | | | | | |
| 16519 | 16518 | T-C | T-T/C | | | | | | |
| | | C-T | C-C/T | | | | | | |
| 16526 | 16525 | A-G | | | | | | | |
| | | | G-G/A | | | | | | |
| 16527 | 16526 | | C-C/T | | | | | | |
| 16537 | 16536 | T-C | T-T/C | | | | | | |

*Sequences found in SEQ ID NO: 102 to 138 of Sequence Listing
*The first nucleotide represents the normal nucleotide, followed by the mutated nucleotide; separated by an “-”.
*When no blood is present, it is denoted as an “X”.
**Historical numbering wherein deletion at BP 3106 is denoted as a gap and the rare polymorphism 750A has been retained

[0262] TABLE 5

| SEQ | | Length | |
|---|---|---|---|
| ID | | (# | |
| NO: | Primer | bases) | 5′-3′ |

D-Loop Primers (used for formalin fixed tissue
and blood for needle biopsies)

| | | | |
|---|---|---|---|
| 19 | 15971f | 20 | TTAACTCCACCATTAGCACC |
| 20 | 15f | 20 | CACCCTATTAACCACTCACG |
| 21 | 16211f | 22 | CAGCAATCAACCCTCAACTATC |
| 22 | 16410r | 19 | AGGATGGTGGTCAAGGGAC |
| 23 | 389r | 20 | CCTAACACCAGCCTAACCAG |
| 24 | 420r | 18 | GTGCATACCGCCAAAAGA |
| 25 | 711r | 21 | AACGGGGATGCTTGCATGTGT |

Formalin Fixed Tissue Primers (used for 31
prostatectomies)

| | | | |
|---|---|---|---|
| 26 | 649f | 21 | TAGGTTTGGTCCTAGCCTTTC |
| 27 | 1051f | 26 | ACAATAGCTAAGACCCAAACTGGGAT |
| 28 | 1247r | 22 | CAAGAGGTGGTGAGGTTGATCG |
| 29 | 8959r | 22 | CGATAATAACTAGTATGGGGAT |
| 30 | 8814f | 22 | CCAACTATCTATAAACCTAGCC |
| 31 | 9247f | 19 | GCCCATGACCCCTAACAGG |
| 32 | 9868r | 21 | CGGATGAAGCAGATAGTGAGG |
| 33 | 9711f | 22 | CTGGGTCTCTATTTTACCCTCC |
| 34 | 10663f | 18 | TCTTTGCCGCCTGCGAAG |
| 35 | 10766r | 22 | TTAGCATTGGAGTAGGTTTAGG |
| 36 | 11813r | 26 | GTAGAGTTTGAAGTCCTTGAGAGAGG |
| 37 | 11629f | 23 | AATCAGCCACATAGCCCTCGTAG |
| 38 | 12709r | 28 | GGAAGATGAGTAGATATTTGAAGAACTG |
| 39 | 12528f | 22 | GAACTGACACTGAGCCACAACC |
| 40 | 13516r | 23 | GGTCTTTGGAGTAGAAACCTGTG |
| 41 | 13239f | 23 | CGTAGCCTTCTCCACTTCAAGTC |
| 42 | 15351r | 23 | TCGTGCAAGAATAGGAGGTGGAG |
| 43 | 15144f | 25 | TCCCGTGAGGCCAAATATCATTCTG |
| 44 | 6145r | 24 | CAGTTGCCAAAGCCTCCGATTATG |
| 45 | 5867f | 25 | CAATGCTTCACTCAGCCATTTTACC |
| 46 | 13957r | 22 | CTAGATAGGGGATTGTGCGGTG |
| 47 | 13838f | 23 | CCCTAGACCTCAACTACCTAACC |
| 48 | 15026r | 21 | GGCAGATAAAGAATATTGAGG |
| 49 | 14937f | 22 | CATCAATCGCCCACATCACTCG |
| 50 | 1938f | 24 | AGAGCACACCCGTCTATGTAGCAA |
| 51 | 2084r | 26 | TACAAGGGGATTTAGAGGGTTCTGTG |
| 52 | 2973f | 24 | TAGGGTTTACGACCTCGATGTTGG |
| 53 | 3101r | 24 | TAGAAACCGACCTGGATTACTCCG |
| 54 | 3728f | 23 | CATATGAAGTCACCCTAGCCATC |
| 55 | 3893r | 23 | GTTCGGTTGGTCTCTGCTAGTGT |
| 56 | 4888f | 27 | CAATCATATACCAAATCTCTCCCTCAC |
| 57 | 5035r | 25 | CATCCTATGTGGGTAATTGAGGAGT |
| 58 | 5981f | 23 | TGGAGTCCTAGGCACAGCTCTAA |
| 59 | 6154r | 24 | GGAACTAGTCAGTTGCCAAAGCCT |
| 60 | 6911f | 24 | TGCAGTGCTCTGAGCCCTAGGATT |
| 61 | 7082r | 26 | GAAGCCTCCTATGATGGCAAATACAG |
| 62 | 7829f | 25 | CGCATCCTTTACATAACAGACGAGG |
| 63 | 8029r | 24 | GGCTTCAATCGGGAGTACTACTCG |

Blood Primers (prostatectomy)

| | | | |
|---|---|---|---|
| 64 | 16485f | 24 | GAACTGTATCCGACATCTGGTTCC |
| 65 | 919r | 22 | TTGGGTTAATCGTGTGACCGCG |
| 66 | 1644r | 26 | CTCCTAAGTGTAAGTTGGGTGCTTTG |
| 67 | 615f | 24 | ATGTTTAGACGGGCTCACATCACC |
| 68 | 1488f | 24 | CGTCACCCTCCTCAAGTATACTTC |
| 69 | 2612r | 28 | GGAACAAGTGATTATGCTACCTTTGCAC |
| 70 | 2417f | 23 | CACTGTCAACCCAACACAGGCAT |
| 71 | 3641r | 23 | GCTAGGCTAGAGGTGGCTAGAAT |
| 72 | 3230f | 23 | GTTAAGATGGCAGAGCCCGGTAA |
| 73 | 4417r | 26 | TTTAGCTGACCTTACTTTAGGATGGG |
| 74 | 4337f | 24 | ATGAGAATCGAACCCATCCCTGAG |
| 75 | 5551r | 24 | GGCTTTGAAGGCTCTTGGTCTGTA |
| 76 | 6418f | 23 | AACCCCCTGCCATAACCCAATAC |
| 77 | 7554r | 33 | CTTTGACAAAGTTATGAAATGGTTTTTCTAATA |
| 78 | 7400f | 22 | CCCACCCTACCACACATTCGAA |
| 79 | 8441r | 26 | GTTGGGTGATGAGGAATAGTGTAAGG |
| 80 | 8346f | 26 | CAACACCTCTTTACAGTGAAATGCCC |
| 81 | 9413r | 24 | GCCTTGGTATGTGCTTTCTCGTGT |
| 82 | 10285r | 21 | GGTAGGGGTAAAAGGAGGGCA |
| 83 | 9273f | 21 | TCAGCCCTCCTAATGACCTCC |
| 84 | 10198f | 19 | CCCGCGTCCCTTTCTCCAT |
| 85 | 11408r | 25 | GGAGTCATAAGTGGAGTCCGTAAAG |
| 86 | 11210f | 24 | TTCTACACCCTAGTAGGCTCCCTT |
| 87 | 12231r | 26 | GTTAGCAGTTCTTGTGAGCTTTCTCG |
| 88 | 12096f | 22 | TCCTATCCCTCAACCCCGACAT |
| 89 | 13098r | 26 | CAACTATAGTGCTTGAGTGGAGTAGG |
| 90 | 12881f | 26 | CATCCTCGCCTTAGCATGATTTATCC |
| 91 | 13851r | 24 | GTTGAGGTCTAGGGCTGTTAGAAG |
| 92 | 14738f | 24 | AGAACACCAATGACCCCAATACGC |
| 93 | 15731r | 28 | CTAGGAGTCAATAAAGTGATTGGCTTAG |
| 94 | 15347f | 23 | CACGAAACGGGATCAAACAACCC |
| 95 | 16000r | 24 | CTTAGCTTTGGGTGCTAATGGTGG |
| 96 | 5544f | 21 | CACGCTACTCCTACCTATCTC |
| 97 | 6482r | 20 | GACTGCTGTGATTAGGACGG |
| 98 | 13354f | 23 | TTTATGTGCTCCGGGTCCATCAT |
| 99 | 14458r | 22 | GATGGCTATTGAGGAGTATCCT |
| 100 | 14399f | 21 | ACACTCACCAAGACCTCAACC |
| 101 | 15593r | 23 | ATCGGAGAATTGTGTAGGCGAAT |

### REFERENCES

[0263] Alonso, A. C Alves, M. P. Suarez-Mier, C Albarran, L Pereira, L Fernandez de Simon, P. Martin, O Garcia, L Gusmao, M Sancho, A Amorim 2005. J Clin Pathology 58: 83-86.
[0264] Anderson S, et al., Nature 290:457-464, 1981
[0265] Andrews R M, et al., Nature Genetics 23(2):147, 1999
[0266] Barringer et al., Gene, 89:117 1990
[0267] Bassam B J, Caetano-Anolles P M, Gresshoff P M., Anal. Biochem. 196: 80-83, 1991
[0268] Bemeburg M, et al., J. Biol. Chem. 274(22):15345-15349, 1999
[0269] Berthon P, Valeri A, Cohen-Akeninc A, Drelon E, Paiss T, Wohr G, Latil A et al., Am. J. Hum. Genet., 62: 1416-1424, 1998
[0270] Birch-Machin M A, et al., Methods in Toxicology, Volume 2, 51-69, 1993
[0271] Birch-Machin M A, et al., J. Invest. Dermatol., 110:149-152 1998
[0272] Birch-Machin M A, Online Conference Report (Sunburnt DNA), International Congress of Biochemistry and Molecular Biology, New Scientist, 2000(a)
[0273] Birch-Machin M A, Taylor R W, Cochran B, Ackrell B A C, Tumbull D M. Ann Neurol 48: 330-335, 2000(b)
[0274] Birch-Machin M A, Clin. Exp. Dermatol, 25(2), 141-146, 2000 (c)
[0275] Birch-Machin M A and Krishnan K. Mitochondrion, 1, p45 (2001).
[0276] Birch-Machin M A, Lindsey J. Lusher M and Krishnan K. Mitochondrion, 1 Suppl. 1, S30 (2001).
[0277] Bogliolo, M, et al., Mutagenesis, 14: 77-82, 1999
[0278] Brierley E J, Johnson M A, Lightowlers R N, James O, Tumbull D M., Ann Neurol 43(2):217-223, 1998
[0279] Brockington, et al., Nature Genet 4:67-71, 1993
[0280] Brown, M. D., et al., Am J. Humn Genet, 60: 381-387, 1997
[0281] Brumley, R. L. Jr. and Smith, L. M., 1991, Rapid DNA sequencing by horizontal ultrathin gel electrophoresis, Nucleic Acids Res. 19:4121-4126 Nucleic Acids Res. 19: 4121-4126
[0282] Buttyan R, Sawczuk I S, Benson M C, Siegal J D, Olsson C A., Prostate 11:327-337, 1987
[0283] Byrne E., Curr Opin Reumatol 4(6):784-793, 1992
[0284] Caims P, Okami K, Halachmi S, Halachmi N, Esteller M, Herman J G, Jen J et al., Cancer Res 57:4997-5000, 1997
[0285] Carew J. S. and Huang P. Molecular Cancer http://www.molecular-cancer.com (2002)
[0286] Chee, M. et al Science 274; 610-614, 1996
[0287] Chen J. Z. et al. Cancer Research (62): 6470-6474 (2002).
[0288] Chen J. Z. et al. Carcinogenesis (Vol 24) No. 9 1481-1487 (2003)
[0289] Chinnery P F, Howel N, Turnbull D M. J. Med. Genet.; 36: 425436, 1999
[0290] Chinnery P F and Turnbull D M., Lancet 354 (supplement 1): 17-21, 1999
[0291] Chinnery P F and Tumbull D M., Lancet 354 (supplement I): 17-21, 2000
[0292] Chollat-Traquet, C, Tobacco or health: a WHO programme., Eur J Cancer, 28(2-3): 311-315, 1992
[0293] Chomyn A, et al., Proc. Natl. Acad. Sci. USA 89(10):4221-4225, 1992
[0294] Cohen D, Barton G, The cost to society of smoking cessation., Thorax. 53(2): S3842, 1998
[0295] Corral-Debrinski et al., Mutat Res, 275: 169-180, 1991
[0296] Cortopassi G. A. and Arnheim, H. Detection of a specific mitochondiral DNA deletion in tissues of older humans, Nucleic Acids Tes. 18, 6927-6933 1990
[0297] Cortopassi G, Wang E., Biochim Biophys Acta 1271(1):171-176, 1995
[0298] Croteau D L, Stierum R H, Bohr V A, Mutat Res 434(3):137-148, 1999
[0299] Current Protocols in Molecular Biology
[0300] Davis R M, Boyd G M, Schoenborn C A, “Common courtesy” and the elimination of passive smoking. Results of the 1987 National Health Interview Survey. JAMA 263(16): 2208-10, 1990
[0301] Dong J T, Isaacs W B, Rinker-Schaeffer C W, Vukanovic J, Ichikawa T, Isaaca J T, Barrett J C., Science 268:884-886, 1995
[0302] Driezen P, Brown K S., Searchable database of questionnaire items from populations surveys of tobacco use in Canada: A summary report to the Ontario Tobacco Research Unit (Toronto, Ontario) 1999
[0303] Easton R D, Merriwether A D, Crews D E, and Ferrell R E., Am. J. Hum. Genet. 59:202-212, 1996
[0304] Fahn H, Wang L, Hseith R, Chang S, Kao S, Huang M, and Wei Y. American Journal of Respiratory Critical Care Medicine, 154:1141-1145, 1996
[0305] Fahn H J, Wang L S, Kao S H, Chang S C, Huang M H, Wei Y H., Am. J. Respir. Cell. Mol. Biol., 19(6): 901-9, 1998
[0306] Finegold D., Mitochondrial Disease-Primary Care Physican's Guide. Psy-Ed. Corp D/B/A Exceptional Parents Guide: 12, 1997
[0307] Flanagan N, Birch-Machin M A, Rees J L., Hum Mol Genet 9 (17):2531-2537, 2000
[0308] Flanagan N, Ray A J, Todd C, Birch-Machin M A and Rees J L. J Invest. Dermatol (2001) 117 (5) 1314-1317
[0309] Fliss M S, et al. Science 287: 2017-2019, 2000
[0310] Gattermann, N, Berneburg, M, Heinisch, J, Aul, C, Schneider, W., Leukemia 9(10): 1704-10, 1995
[0311] Green R, Reed J C., Science 281 (5381):1309-1312, 1998
[0312] Guatelli, et al., Proc. Nat. Acad. Sci. U.S.A. 87: 1874 1990
[0313] Gulavita, Sunil Dr. Northwestern Ontario Cancer Centre—Personal Communication
[0314] Habano S, Nakamura, Sugai T., Oncogene 17 (15):1931-1937, 1998
[0315] Harding R M, et al., Am. J. Hum. Genet. 66, 1351-1361, 2000
[0316] Harman, D., Proc Nati Acad Sci USA 78(11): 7124-8, 1981
[0317] Hattori et al, Age-dependant increase in deleted mitochondrial DNA in the human heart: possible contributory factor to presbycardia, AM. Heart J., 121, 1735-1742, 1991
[0318] Hayashi J, Ohta S, Kikuchi A, Takemitsu M, Goto Y, Nonaka 1., Proc Natl Acad Sci USA 88 (23):10614-10618, 1991
[0319] Hayashi J, Ohta S, Kikuchi A, Takemitsu M, Goto Y, Nonaka I., Proc Natl Acad Sci USA 88 (23):10614-10618, 1991
[0320] Hayward S W, Grossfeld G D, TIsty T D, Cunha G R., Int J Oncol 13:3547, 1998
[0321] Healy E, Birch-Machin M A, Rees J L. Chapter 11. The Human Melanocortin 1 Receptor Gene. In the Melanocortin Receptors(Cone R D (ed)). Humana Press Inc. New Jersey, USA, 1999
[0322] Healy E, Birch-Machin M A, Rees J L., Lancet 355, 1072-1073, 2000
[0323] Hearst N, Hulley S B. Using secondary data, In Designing clinical research: an epidemiological approach. Ed. Hulley, S. and Cummings, S., Baltimore: Williams & Wilkins, pages 53-62, 1988
[0324] Hopgood, R., et al, 1992, Strategies for automated sequencing of human mtDNA directly from PCR products, Biotechniques 13:82-92
[0325] Hsieh, R H and Wei, Y H, Age-dependent multiple deletions in human muscle mitochondrial DNA, in preparation 1992
[0326] Huang G M, Ng W L, Farkas J, He L, Liang H A, Gordon D, Hood R., Genomics 59(2):178-86, 1999
[0327] Huoponen, Kirsi, Leber hereditary optic neuropathy: clinical and molecular genetic findings, Neurogenetics (2001) 3: 119-125. Http://www.oml.gov/hgmis/project/budget.html)
[0328] Ikebe et al., Increase of deleted mitochondrial DNA in the striatum in Parkinson's disease and senescence, Biochem. Biophys. Res. Commun. 170, 1044-1048, 1990
[0329] Innis et al PCR Protocols, A Guide to Methods and Application, Academic Press Inc. San Diego 1990
[0330] Kaiserman M J, Chronic Dis Can 18(1): 13-9, 1997
[0331] Kalra J, Chaudhary A K, Prasad K, Int. J. Exp. Pathol. 72(1): 1-7, 1991
[0332] Katayama et al., Deleted mitochondrial DNA in the skeletal muscle of aged individuals, Biochem. Int., 25, 47-56 1991
[0333] Kleinle S, et al., Human Genet. 290: 457-465, 1997
[0334] Konishi N, Cho M, Yamamoto K, Hiasa Y. Pathol. Int. 47:735-747, 1997
[0335] Krishnan K and Birch-Machin M A. British Journal of Dermatology (2002), 146, 723
[0336] Kwoh et al. Proc. Natl. Acad. Sci. U.S.A., 86: 1173 1989
[0337] Landis S H, Murray T, Bolden S, Wingo P A. Cancer J. Clin. 49:8-31
[0338] Landis, S H, et al., CA Cancer J. Clin. 49: 8-31, 1999
[0339] Landegren et al. Science, 241:1077 1988
[0340] LeDoux S P, et al. Mutat Res 434(3):149-159, 1999
[0341] Lee H C, et al. FEBS Letters 354:79-83, 1994
[0342] Lee H C, Lu C Y, Fahn H J, Wei YHu. Federation of European Biochemical Societies, 441:292-296, 1998
[0343] Lee H C, et al. Arch. Biochem. Biophys. 362(2): 309-16, 1999
[0344] Leonard & Shapira 1997
[0345] Lindsey J, Lusher M, Krishnan K J and Birch-Machin M A., British Journal of Dermatology (2001), 144,655
[0346] Li Y, et al., In: Oxygen Radicals and the Disease Process, Amsterdam, The Netherlands: Harwood Academic Publishers, 237-277, 1997
[0347] Linnane et al., 1990
[0348] Liu C S, Kao S H, Wei Y H. Environ. Mol. Mutagen 30(1): 47-55, 1997
[0349] Lopez, J. V. et al. (1994) Numt, a recent transfer and tandem amplification of mitochondrial DNA to the nuclear genome of the cat. J. Mol. Evol. 39, 174-190.
[0350] Lowes S, Krishnan K, Lindsey J, Lusher M and Brich-Machin M A. British Journal of Dermatology (2002, 146,736
[0351] Luckey, J. A., et al, 1993, High speed DNA sequencing by capillary gel electrophoresis, Methods Enzymol. 218:154-172
[0352] McCormack, Douglas. Website: http://cormactech.com/dna, 2001
[0353] Meibner C, von Wurmb N, Oehmichen M., Int. J. Legal Med. 110: 288-291, 1997
[0354] Michikawa Y, Mazzucchelli F, Bresolin N, Scarlato G, Attardi G., Science 286: 774-779, 1999
[0355] Miquel J, de Juan E, Sevila I. EXS 62:47-57, 1992
[0356] MITOMAP: A human mt genome database (www.gen.emory.edu/mitomap.html)
[0357] MITOMAP: A Human Mitochondrial Genome Database. http://www.mitomap.org, 2005.
[0358] Mitochondrial Research Society http://www.mitoresearch.org/diseases.html.
[0359] Mullis and Faloona Methods Enzymol 155, 335 1987
[0360] Nachman M W, Brown W M, Stoneking M, Aquardo C F., Genetics 142:53-963, 1996
[0361] National Cancer Institute of Canada, Canadian cancer statistics 2000., National Cancer Institute of Canada., Toronto, Ont. 2000
[0362] Naviaux, R K., Mitochondrial Disease-Primary Care Physican's Guide. Psy-Ed. Corp D/B/A Exceptional Parents Guide: 3-10, 1997
[0363] Newton, C R and Graham, A., Introduction toBiotecniques Series 1997
[0364] Oefner P J, Underhill P A., Current protocols in human genetics 19, 7.10.1-12, 1998
[0365] Ozen M, et al, Prostate 36:264-271, 1998
[0366] Pang et al, Arch. Biochem. Biophys. 312: 534-538, 1994
[0367] Parsons T J, et al., Nature Genet. 15 (4):363-368, 1997
[0368] Pascucci B, et al., J. Mol. Biol. 273 (2):417-427, 1997
[0369] Penta J S, Johnson F M, Wachsman J T, Copeland W C., Mut. Res. 488, 119-133, 2001
[0370] Polyak Y, et al., Nature Genet. 20 (3):291-293, 1998
[0371] Ray A J, Rees J L, Birch-Machin M A., J. Invest. Dermatol. 110:692, 1998
[0372] Ray A J, Rees J L, Birch-Machin M A., Brit. J. Dermatol. 140:788, 1999
[0373] Ray A J, Pickersgill L, Turner R, Nikaido O, Rees J L, Birch-Machin M A., J. Invest. Dermatol 115(4):674-679, 2000
[0374] Rees J L, Skin cancer. In: The Genetic Basis of Human Cancer, eds Vogelstein B, Kinzler K. New York: McGraw-Hill, pp527-536, 1998
[0375] Rehman I, Quinn A J, Healy E, Rees J L. Lancet 344: 788-789, 1994
[0376] Rehman I, Takata M, Wu Y Y, Rees J L. Oncogene 12: 2483-2490, 1996
[0377] SAS Enterprise Mining Users Guide, SAS Inc., 2000
[0378] Sawyer E, Van Houten B., Mutation Res: 434(3):161-176, 1999
[0379] Schurr T G, Ballinger S W, Gan Y, Hodge J A, Merriwether D A, Lawrence D N, Knowler W C, Weiss K M, and Wallace D C., Am. J. Hum. Genet. 46:613-623, 1990
[0380] Seidman, M. D. et al., Arch. Otolaryngol Head Neck Surg., 123: 1039-1045, 1997
[0381] Seo, Jinwook, Shneiderman, Ben, Interactively Exploring Hierarchical Clustering Results, IEEE Computer, Volume 35, Number 7, pp. 80-86, July 2002. [initial draft (pdf)]
[0382] Seo, Jinwook, et al., Interactive Color Mosaic and Dendrogram Displays for Signal/Noise Optimization in Microarray Data Analysis, IEEE International Conference on Multimedia and Expo 2003.
[0383] Seo, Jinwook, Shneiderman, Ben, Interactive Exploration of Multidimensional Microarray Data: Scatterplot Ordering, Gene Ontology Browser, and Profile Search, HCIL-2003-25, CS-TR-4486, UMIACS-TR-2003-55.
[0384] Seo, Jinwook et al., Interactively optimizing signal-to-noise ratios in expression profiling: project-specific algorithm selection and detection p-value weighting in Affymetrix microarrays, Bioinformatics, Vol. 20, pp. 2534-2544, 2004a.
[0385] Seo, Jinwook, Shneiderman, Ben, A Rank-by-Feature Framework for Unsupervised Multidimensional Data Exploration Using Low Dimensional Projections, Proc. IEEE InfoVis 2004b, pp. 65-72.
[0386] Seo, Jinwook, Shneiderman, Ben, A Rank-by-Feature Framework for Interactive Exploration of Multidimensional Data, will appear in the journal, Information Visualization, 2005a. (pdf)
[0387] Seo, Jinwook, Shneiderman, Ben, Understanding Clusters in Multidimensional Spaces: Mading Meaning by Combining Insights from Coordinated Views of Domain Knowledge, Technical Report, HCIL-2004-03, 2004c.
[0388] Seo, Jinwook, Shneiderman, Ben, Knowledge Integration Framework for Information Visualization, will be published in LNCS by Springer-Verlag, Berlin Heidelberg New York, 2005b. (pdf)
[0389] Shankey T V, Jin J K, Dougherty S, Flanigan R C, Graham S, Pyle J M., Cytometry 21:30-39, 1995
[0390] Shay J W, Werbin H., Mutat. Res: 186: 149, 1987
[0391] Sherrat E J, Thomas A W, Alcolado J C., Clin. Sci. 92:225-235, 1997
[0392] Shoffner J M, Brown M D, Torroni A, Loft M T, Cabell M F, Mirra S S, Beal M F, Yang C, Gearing M, Salvo R, Watts R L, Juncos J L, Hansen L A, Crain B J, Fayad M, Reckford C L, and Wallace D C., Genomics 17:171-184, 1993
[0393] Singh K. K. and Modica-Napolitano J. S. Expert reviews in molecular medicine. http://www.ermm.cbcu.ac.uk (2002)
[0394] Smith D G, Malhi R S, Eshleman J, Lorenz J G and Kaestle F A., Am. J. Hum. Genet. 110:271-284, 1999
[0395] Smith R, Birch-Machin M A, Rees J L. J. Invest. Dermatol. 111: 101-104, 1998 SpringNet—CE Connection: Screening, Diagnosis: Improving Primary Care Outcomes. Website: http://www.springnet.com/ce/j803a.htm
[0396] Stone A C and Stoneking M. Amer. J., Phys. Anthro. 92(4):463-471, 1993
[0397] Tamura S, et al. Eur. J. Cancer[A] 35 (2):316-319, 1999
[0398] Tanaka, M. et al, 1996, Automated sequencing of mtDNA, Methods Enzymol. 264: 407-421
[0399] Taniike, M. et al., BioChem BioPhys Res Comun, 186: 47-53, 1992
[0400] Taylor R W, Birch-Machin M A, Bartlett K, Turnbull D M., J Biol Chem, 269, 3523-3528 1994
[0401] Tijssen, P. (ed) Laboratory Techniques in Biochemistry and Molecular Biology, Vol. 24: Hybridization with Polynucleotide Probes, Elsevier, N.Y., 1993
[0402] Tori et al., Ageing-associated deletions of human diaphragmatic mitochondrial DNA, AM. J. Respir. Cell. Mol. Biol. in press 1992
[0403] Valnot, Isabelle, et al., A mitochondrial cytochrome b mutation but no mutations of nuclearly encoded subunits in ubiquinol cytochrome c reductase (complex III) deficiency, Human Genetics (1999) 104: 460-466.
[0404] Van De Graff, K M, Fox, S I. Concepts of Human Anatomy and Physiology., Dubuque: W M. C. Brown Publishers, 1995
[0405] Van den Bosch B J C, et al., Nucleic Acids Res. 28: 89, 2000
[0406] von Wurmb, N, Oehmichen, M, Meissner, C., Mutat Res. 422:247-254, 1998
[0407] Wallace D C., Annu Rev Biochem, 61: 1175-1212, 1992
[0408] Wallace D C. Proc. Natl. Acad. Sci. USA 91: 8739-8746, 1994
[0409] Wald and Wallace, D. C., Mitochondrial Diseases in man and Mouse. Science, 5(283): 1482-1497, 1999
[0410] Wald, N J, Hackshaw, A K, Cigarette Smoking: an epidemiological overview. Br Med Bull. 52(1): 3-11, 1996
[0411] Wallace et al., Mitochondiral DNA MUtatio Assoicated with Leber's Hereditary Optic Neuropathy, Science, 1427-1429
[0412] Walsh P C, Partin A W. Cancer 80:1871-1874, 1997
[0413] Ward R H, Frazier B L, Dew-Jager K, Paabo S., Proc. Natl. Acad. Sci. USA 88:8720-8724, 1991 Ward 1993
[0414] Wei Y H, Pang C, You B, Lee H. Ann. NY Acad. Sci. 786:82-101, 1996
[0415] Wei Y H. Proceedings of the Nat. Sci. Council of the Republic of China April 22(2):5567, 1998
[0416] Weinstock M A: In: J J Stem R S, MacKie R M and Weinstock M A, Grob (eds) Epidemiology, Blackwell (UK). pp121-128, 1998
[0417] Woodwell D A. National Ambulatory Medical Care Survey: 1997 Summary. Advance data from vital and health statistics; no. 305. Hyattsville, Md.: National Center for Health Statistics. 1999
[0418] Wu & Wallace Genomics, 4:560, 1989
[0419] Xu J, et al., Nature Genet 20: 175-179, 1998
[0420] Yamaguchi K T, et al., Free Radical Res. Commun. 16(3):167-74, 1992
[0421] Yeh, J. J., et al., Oncogene Journal, 19: 2060-2066, 2000
[0422] Yen et al., Ageing-associated 5 kb deletion in human liver mitochondrial DNA, Biochem., Biophys., Res. Commun., 178, 124-131 1991
[0423] Yen et al., Age-dependent 6 kb deletion in human liver mitochondirial DNA, Biochem. Int. 26, 457-468 1992
[0424] Zeviani M, et al. Am. J. Hum. Genet. 47:904-914, 1990
[0425] Zhang et al., Multiple mitochondiral DNA deletions in an elderly human individual, FEBS Lett, 297, 34-38 1992
[0426] Zhang, C., et al., BioChem. BioPhys. Res. Comun., 195:1104-1110, 1993
[0427] Zhao, Po et al., In vivo filtering of in vitro MyoD target data: An approach for identification of biologically relevant novel downstream targets of transcription fctors, Comptes Rendus Biologies, Vol. 326, Issues 10-11, October-November 2003, pp 1049-1065.

We claim:

1. Use of a synonymous or non-synonymous mutation in an ND1 nucleic acid molecule of mtDNA, to detect a predisposition to prostate cancer, early detection of prostate cancer, genesis of prostate cancer, presence of prostate cancer, or progression of prostate cancer in a subject having mtDNA.

2. Use of a synonymous or non-synonymous mutation in an ND2 nucleic acid molecule of mtDNA, to detect a predisposition to prostate cancer, early detection of prostate cancer, genesis of prostate cancer, presence of prostate cancer, or progression of prostate cancer in a subject having mtDNA.

3. Use of a synonymous or non-synonymous mutation in a COX1 nucleic acid molecule of mtDNA, to detect a predisposition to prostate cancer, early detection of prostate cancer, genesis of prostate cancer, presence of prostate cancer, or progression of prostate cancer in a subject having mtDNA.

4. Use of a synonymous or non-synonymous mutation in a CytB nucleic acid molecule of mtDNA, to detect a predisposition to prostate cancer, early detection of prostate cancer, genesis of prostate cancer, presence of prostate cancer, or progression of prostate cancer in a subject having mtDNA.

5. The use of any of claims 1 to 4 wherein the mutation is detected in malignant tissue, adjacent benign tissue, or distant benign tissue in a subject having prostate cancer or progressing toward prostate cancer.

6. A method of detecting a mutation associated with prostate cancer in a subject having mtDNA, comprising:
a. providing a biological sample from the subject, wherein the biological sample is chosen from non-involved tissue, distant benign tissue, adjacent benign tissue, atypical tissue, histologically abnormal tissue, and malignant tissue;
b. extracting DNA from the biological sample;
c. detecting the presence of the mutation in ND1, ND2, COX1 or CytB of mtDNA; and
d. determining whether the mutation is associated with normal interpopulation or intrapopulation variations, or whether the mutation is associated with prostate cancer.

7. The method of claim 6 further comprising at least one of
a. determining total mutation load in the mtDNA of the biological sample; and
b. determining the identity of the mutation in the mtDNA of the biological sample.

8. The method of claim 6 where the step of determining whether the mutation is associated with normal interpopulation or intrapopulation variations, or whether the mutation is associated with prostate cancer, comprises at least one of:
(a) comparing the mtDNA of the biological sample to a database, the database containing data of interpopulation and intrapopulation variations, and mutations associated with prostate cancer; and
(b) determining total mutation load of the biological sample.

9. The method of claim 6 for use in a diagnosis, wherein the diagnosis is chosen from predisposition to prostate cancer, early detection of prostate cancer, genesis of prostate cancer, presence of prostate cancer, and progression of prostate cancer.

10. The method of claim 6 wherein the step of detecting the presence of mutations is chosen from:
(a) sequencing the mtDNA;
(b) amplifying mtDNA by PCR;
(c) Southern, Northern, Western and South-Western blot hybridizations;
(d) denaturing HPLC;
(e) hybridization to microarrays, gene chips or biochips;
(f) molecular marker analysis; and
(g) a combination of any of a) through f).

11. The method of claim 10 wherein the mitochondrial DNA which is sequenced comprises the entire mitochondrial genome.

12. The method of any of claims 6 to 11 wherein the mutation is a synonymous or non-synonymous mutation.

13. The method of claim 6 where the mutation is heteroplasmic at any level.

14. An array comprising a plurality of nucleic acid members, and a solid substrate, wherein each of the nucleic acid members is associated with at least one mutation in ND1, ND2, COX1 or CytB of the mitochondrial genome and is indicative of the presence of prostate cancer, and is chosen from mitochondrial DNA, RNA transcribed from mitochondrial DNA, and cDNA, wherein each nucleic acid member has a unique position on said array and is stably associated with the solid substrate.

15. An array comprising a plurality of nucleic acid members, and a solid substrate, wherein each of the nucleic acid members is associated with at least one mutation in ND1, ND2, COX1 or CytB of the mitochondrial genome and is indicative of the progression toward prostate cancer, and is chosen from mitochondrial DNA, RNA transcribed from mitochondrial DNA, and cDNA, wherein each nucleic acid member has a unique position on said array and is stably associated with the solid substrate.

16. A kit for diagnosing prostate cancer comprising a disposable chip, the array of any of claims 14 and 15, means for holding the disposable chip, means for extraction of mitochondrial DNA and means for access to a database of mitochondrial DNA sequences.

17. A kit for determining the progression toward prostate cancer or early detection of prostate cancer comprising a disposable chip, the array of any of claims 14 and 15, means for holding the disposable chip, means for extraction of mitochondrial DNA and means for access to a database of mitochondrial DNA sequences.

18. A database containing mitochondrial DNA sequences for ND1, ND2, COX1 and CytB, the sequences are chosen from normal control sequences associated with non-disease states, sequences associated with interpopulation variations, sequences associated with intrapopulation variations, and sequences associated with prostate cancer.

19. A method of monitoring a person for the progression toward prostate cancer or progression of prostate cancer, in a biological sample from a subject, comprising:
(a) providing a biological sample from the subject;
(b) extracting DNA from the biological sample;
(c) detecting the presence of mutations in the ND1, ND2, COX1 or CytB genes of the mtDNA;
(d) determining whether the mutations are associated with normal interpopulation or intrapopulation variations, or whether the mutations are associated with presence of a predisposition to prostate cancer, progression toward prostate cancer, prostate cancer or progression of prostate cancer, and;
(e) repeating steps (a) to (d).

20. The method of claim 19 wherein the biological sample is from a tissue that is chosen from normal tissue, distant benign tissue, adjacent benign tissue, diseased tissue and malignant tissue.

21. The method of claim 20 wherein the step of detecting the presence of mutations in the ND1, ND2, COX1 and CytB genes of mitochondrial DNA comprises at least one of:
(a) comparing the mtDNA of the biological sample to the database of claim 18;
(b) comparing the mtDNA of the biological sample to a sample of mtDNA from non-involved tissue or non-involved bodily fluid from the subject;
(c) comparing the mtDNA of the biological sample to a sample of mtDNA from a maternal relative of the subject;
(d) determining total mutation load of the biological sample; and
(e) identifying the mutations.

22. The method of any of claims 19 to 21 wherein the mutations are synonymous or non-synonymous.

23. The method of claim 19 for monitoring the progression toward prostate cancer or progression of prostate cancer further comprising monitoring the subject at successive time periods for an increase in mutations in ND1, ND2, COX1 or CytB, or an increase in the number of mitochondrial genomes having mutations in ND1, ND2, COX1 or CytB.

24. An isolated mitochondrial ND1 nucleic acid molecule comprising at least one synonymous or non-synonymous mutation for use in detecting the progression toward prostate cancer or the presence of prostate cancer in a subject.

25. An isolated mitochondrial ND2 nucleic acid molecule comprising at least one synonymous or non-synonymous mutation for use in detecting the progression toward prostate cancer or the presence of prostate cancer in a subject.

26. An isolated mitochondrial COX1 nucleic acid molecule comprising at least one synonymous or non-synonymous mutation for use in detecting the progression toward prostate cancer or the presence of prostate cancer in a subject.

27. An isolated mitochondrial CytB nucleic acid molecule comprising at least one synonymous or non-synonymous mutation for use in detecting the progression toward prostate cancer or the presence of prostate cancer in a subject.

The application's sequence listing, which the Patent Office published only in electronic form, follows.

SEQUENCE LISTING (138 sequences)

SEQ ID NO: 1 - DNA, 20 bp, Artificial sequence
  primer sequence
aacacatctctgccaaaccc

SEQ ID NO: 2 - DNA, 20 bp, Artificial sequence
  Primer sequence
taagtgctgtggccagaagc

SEQ ID NO: 3 - DNA, 20 bp, Artificial sequence
  Primer sequence
cccatactactaatctcatc

SEQ ID NO: 4 - DNA, 20 bp, Artificial sequence
  Primer sequence
agtgggaggggaaaataatg

SEQ ID NO: 5 - DNA, 28 bp, Artificial sequence
  Primer sequence
aacacatctctgccaaaccccaaaaaca

SEQ ID NO: 6 - DNA, 25 bp, Artificial sequence
  Primer sequence
ccggcggcgggagaagtagattgaa

SEQ ID NO: 7 - DNA, 26 bp, Artificial sequence
  Primer sequence
gggagaagccccggcaggtttgaagc

SEQ ID NO: 8 - DNA, 28 bp, Artificial sequence
  Primer sequence
atgatgtctgtgtggaaagtggctgtgc

SEQ ID NO: 9 - DNA, 22 bp, Artificial sequence
  Primer sequence
tataccgccatcttcagcaaac

SEQ ID NO: 10 - DNA, 22 bp, Artificial sequence
  Primer sequence
tactgctaaatccaccttcgac

SEQ ID NO: 11 - DNA, 22 bp, Artificial sequence
  Primer sequence
ccttacactattcctcatcacc

SEQ ID NO: 12 - DNA, 22 bp, Artificial sequence
  Primer sequence
tgtggtctttggagtagaaacc

SEQ ID NO: 13 - DNA, 21 bp, Artificial sequence
  Primer sequence
ccctgtacgaaaggacaagag

SEQ ID NO: 14 - DNA, 18 bp, Artificial sequence
  Primer sequence
tgaggagtaggaggttgg

SEQ ID NO: 15 - DNA, 23 bp, Artificial sequence
  Primer sequence
cccatcgtcctagaattaattcc

SEQ ID NO: 16 - DNA, 19 bp, Artificial sequence
  Primer sequence
atggtgggccatacggtag

SEQ ID NO: 17 - DNA, 22 bp, Artificial sequence
  Primer sequence
cccatgcctcaggatactcctc

SEQ ID NO: 18 - DNA, 18 bp, Artificial sequence
  Primer sequence
gcgtgaaggtagcggatg

SEQ ID NO: 19 - DNA, 20 bp, Artificial sequence
  Primer sequence
ttaactccaccattagcacc

SEQ ID NO: 20 - DNA, 20 bp, Artificial sequence
  Primer sequence
caccctattaaccactcacg

SEQ ID NO: 21 - DNA, 22 bp, Artificial sequence
  Primer sequence
cagcaatcaaccctcaactatc

SEQ ID NO: 22 - DNA, 19 bp, Artificial sequence
  Primer sequence
aggatggtggtcaagggac

SEQ ID NO: 23 - DNA, 20 bp, Artificial sequence
  Primer sequence
cctaacaccagcctaaccag

SEQ ID NO: 24 - DNA, 18 bp, Artificial sequence
  Primer sequence
gtgcataccgccaaaaga

SEQ ID NO: 25 - DNA, 21 bp, Artificial sequence
  Primer sequence
aacggggatgcttgcatgtgt

SEQ ID NO: 26 - DNA, 21 bp, Artificial sequence
  Primer sequence
taggtttggtcctagcctttc

SEQ ID NO: 27 - DNA, 26 bp, Artificial sequence
  Primer sequence
acaatagctaagacccaaactgggat

SEQ ID NO: 28 - DNA, 22 bp, Artificial sequence
  Primer sequence
caagaggtggtgaggttgatcg

SEQ ID NO: 29 - DNA, 22 bp, Artificial sequence
  Primer sequence
cgataataactagtatggggat

SEQ ID NO: 30 - DNA, 22 bp, Artificial sequence
  Primer sequence
ccaactatctataaacctagcc

SEQ ID NO: 31 - DNA, 19 bp, Artificial sequence
  Primer sequence
gcccatgacccctaacagg

SEQ ID NO: 32 - DNA, 21 bp, Artificial sequence
  Primer sequence
cggatgaagcagatagtgagg

SEQ ID NO: 33 - DNA, 22 bp, Artificial sequence
  Primer sequence
ctgggtctctattttaccctcc

SEQ ID NO: 34 - DNA, 18 bp, Artificial sequence
  Primer sequence
tctttgccgcctgcgaag

SEQ ID NO: 35 - DNA, 22 bp, Artificial sequence
  Primer sequence
ttagcattggagtaggtttagg

SEQ ID NO: 36 - DNA, 26 bp, Artificial sequence
  Primer sequence
gtagagtttgaagtccttgagagagg

SEQ ID NO: 37 - DNA, 23 bp, Artificial sequence
  Primer sequence
aatcagccacatagccctcgtag

SEQ ID NO: 38 - DNA, 28 bp, Artificial sequence
  Primer sequence
ggaagatgagtagatatttgaagaactg

SEQ ID NO: 39 - DNA, 22 bp, Artificial sequence
  Primer sequence
gaactgacactgagccacaacc

SEQ ID NO: 40 - DNA, 23 bp, Artificial sequence
  Primer sequence
ggtctttggagtagaaacctgtg

SEQ ID NO: 41 - DNA, 23 bp, Artificial sequence
  Primer sequence
cgtagccttctccacttcaagtc

SEQ ID NO: 42 - DNA, 23 bp, Artificial sequence
  Primer sequence
tcgtgcaagaataggaggtggag

SEQ ID NO: 43 - DNA, 25 bp, Artificial sequence
  Primer sequence
tcccgtgaggccaaatatcattctg

SEQ ID NO: 44 - DNA, 24 bp, Artificial sequence
  Primer sequence
cagttgccaaagcctccgattatg

SEQ ID NO: 45 - DNA, 25 bp, Artificial sequence
  Primer sequence
caatgcttcactcagccattttacc

SEQ ID NO: 46 - DNA, 22 bp, Artificial sequence
  Primer sequence
ctagataggggattgtgcggtg

SEQ ID NO: 47 - DNA, 23 bp, Artificial sequence
  Primer sequence
ccctagacctcaactacctaacc

SEQ ID NO: 48 - DNA, 21 bp, Artificial sequence
  Primer sequence
ggcagataaagaatattgagg

SEQ ID NO: 49 - DNA, 22 bp, Artificial sequence
  Primer sequence
catcaatcgcccacatcactcg

SEQ ID NO: 50 - DNA, 24 bp, Artificial sequence
  Primer sequence
agagcacacccgtctatgtagcaa

SEQ ID NO: 51 - DNA, 26 bp, Artificial sequence
  Primer sequence
tacaaggggatttagagggttctgtg

SEQ ID NO: 52 - DNA, 24 bp, Artificial sequence
  Primer sequence
tagggtttacgacctcgatgttgg

SEQ ID NO: 53 - DNA, 24 bp, Artificial sequence
  Primer sequence
tagaaaccgacctggattactccg

SEQ ID NO: 54 - DNA, 23 bp, Artificial sequence
  Primer sequence
catatgaagtcaccctagccatc

SEQ ID NO: 55 - DNA, 23 bp, Artificial sequence
  Primer sequence
gttcggttggtctctgctagtgt

SEQ ID NO: 56 - DNA, 27 bp, Artificial sequence
  Primer sequence
caatcatataccaaatctctccctcac

SEQ ID NO: 57 - DNA, 25 bp, Artificial sequence
  Primer sequence
catcctatgtgggtaattgaggagt

SEQ ID NO: 58 - DNA, 23 bp, Artificial sequence
  Primer sequence
tggagtcctaggcacagctctaa

SEQ ID NO: 59 - DNA, 24 bp, Artificial sequence
  Primer sequence
ggaactagtcagttgccaaagcct

SEQ ID NO: 60 - DNA, 24 bp, Artificial sequence
  Primer sequence
tgcagtgctctgagccctaggatt

SEQ ID NO: 61 - DNA, 26 bp, Artificial sequence
  Primer sequence
gaagcctcctatgatggcaaatacag

SEQ ID NO: 62 - DNA, 25 bp, Artificial sequence
  Primer sequence
cgcatcctttacataacagacgagg

SEQ ID NO: 63 - DNA, 24 bp, Artificial sequence
  Primer sequence
ggcttcaatcgggagtactactcg

SEQ ID NO: 64 - DNA, 24 bp, Artificial sequence
  Primer sequence
gaactgtatccgacatctggttcc

SEQ ID NO: 65 - DNA, 22 bp, Artificial sequence
  Primer sequence
ttgggttaatcgtgtgaccgcg

SEQ ID NO: 66 - DNA, 26 bp, Artificial sequence
  Primer sequence
ctcctaagtgtaagttgggtgctttg

SEQ ID NO: 67 - DNA, 24 bp, Artificial sequence
  Primer sequence
atgtttagacgggctcacatcacc

SEQ ID NO: 68 - DNA, 24 bp, Artificial sequence
  Primer sequence
cgtcaccctcctcaagtatacttc

SEQ ID NO: 69 - DNA, 28 bp, Artificial sequence
  Primer sequence
ggaacaagtgattatgctacctttgcac

SEQ ID NO: 70 - DNA, 23 bp, Artificial sequence
  Primer sequence
cactgtcaacccaacacaggcat

SEQ ID NO: 71 - DNA, 23 bp, Artificial sequence
  Primer sequence
gctaggctagaggtggctagaat

SEQ ID NO: 72 - DNA, 23 bp, Artificial sequence
  Primer sequence
gttaagatggcagagcccggtaa

SEQ ID NO: 73 - DNA, 26 bp, Artificial sequence
  Primer sequence
tttagctgaccttactttaggatggg

SEQ ID NO: 74 - DNA, 24 bp, Artificial sequence
  Primer sequence
atgagaatcgaacccatccctgag

SEQ ID NO: 75 - DNA, 24 bp, Artificial sequence
  Primer sequence
ggctttgaaggctcttggtctgta

SEQ ID NO: 76 - DNA, 23 bp, Artificial sequence
  Primer sequence
aaccccctgccataacccaatac

SEQ ID NO: 77 - DNA, 33 bp, Artificial sequence
  Primer sequence
ctttgacaaagttatgaaatggtttttctaata

SEQ ID NO: 78 - DNA, 22 bp, Artificial sequence
  Primer sequence
cccaccctaccacacattcgaa

SEQ ID NO: 79 - DNA, 26 bp, Artificial sequence
  Primer sequence
gttgggtgatgaggaatagtgtaagg

SEQ ID NO: 80 - DNA, 26 bp, Artificial sequence
  Primer sequence
caacacctctttacagtgaaatgccc

SEQ ID NO: 81 - DNA, 24 bp, Artificial sequence
  Primer sequence
gccttggtatgtgctttctcgtgt

SEQ ID NO: 82 - DNA, 21 bp, Artificial sequence
  Primer sequence
ggtaggggtaaaaggagggca

SEQ ID NO: 83 - DNA, 21 bp, Artificial sequence
  Primer sequence
tcagccctcctaatgacctcc

SEQ ID NO: 84 - DNA, 19 bp, Artificial sequence
  Primer sequence
cccgcgtccctttctccat

SEQ ID NO: 85 - DNA, 25 bp, Artificial sequence
  Primer sequence
ggagtcataagtggagtccgtaaag

SEQ ID NO: 86 - DNA, 24 bp, Artificial sequence
  Primer sequence
ttctacaccctagtaggctccctt

SEQ ID NO: 87 - DNA, 26 bp, Artificial sequence
  Primer sequence
gttagcagttcttgtgagctttctcg

SEQ ID NO: 88 - DNA, 22 bp, Artificial sequence
  Primer sequence
tcctatccctcaaccccgacat

SEQ ID NO: 89 - DNA, 26 bp, Artificial sequence
  Primer sequence
caactatagtgcttgagtggagtagg

SEQ ID NO: 90 - DNA, 26 bp, Artificial sequence
  Primer sequence
catcctcgccttagcatgatttatcc

SEQ ID NO: 91 - DNA, 24 bp, Artificial sequence
  Primer sequence
gttgaggtctagggctgttagaag

SEQ ID NO: 92 - DNA, 24 bp, Artificial sequence
  Primer sequence
agaacaccaatgaccccaatacgc

SEQ ID NO: 93 - DNA, 28 bp, Artificial sequence
  Primer sequence
ctaggagtcaataaagtgattggcttag

SEQ ID NO: 94 - DNA, 23 bp, Artificial sequence
  Primer sequence
cacgaaacgggatcaaacaaccc

SEQ ID NO: 95 - DNA, 24 bp, Artificial sequence
  Primer sequence
cttagctttgggtgctaatggtgg

SEQ ID NO: 96 - DNA, 21 bp, Artificial sequence
  Primer sequence
cacgctactcctacctatctc

SEQ ID NO: 97 - DNA, 20 bp, Artificial sequence
  Primer sequence
gactgctgtgattaggacgg

SEQ ID NO: 98 - DNA, 23 bp, Artificial sequence
  Primer sequence
tttatgtgctccgggtccatcat

SEQ ID NO: 99 - DNA, 22 bp, Artificial sequence
  Primer sequence
gatggctattgaggagtatcct

SEQ ID NO: 100 - DNA, 21 bp, Artificial sequence
  Primer sequence
acactcaccaagacctcaacc

SEQ ID NO: 101 - DNA, 23 bp, Artificial sequence
  Primer sequence
atcggagaattgtgtaggcgaat

SEQ ID NO: 102 - DNA, 16568 bp, Homo sapiens mitochondrial DNA
  misc_feature (16318)..(16318): n is a, c, g, or t
gatcacaggyctatcaccctattaaccactyacgggagctytccatgcatttggyawtttygtytggggggyrtgcacgcgatagcattgcgrracgctggagycggagcacyctatgycgcagtatytgtctttgattcctgccycatycyrttatttatcgcacctaygttcaatattayagdcgrrcayayyyacyyragyrtrytaattratyaatgyttryarkacatrrtaayaacaattraatgtctgcacagcydytttccacacagayatyataacaaaaaatttycrccaaaccycccyyyyyccgcttctgrcyacakcacttaaacacatctctgccaaaccccaaaaacaaagaaccctaacaccagcctaaccagatttyaaattttatcttttggcggtatgcrcttttaacagtcaccccccaactaacacattattttyccctcycaytcycatactacyaatyycatcaayacaacccycrcycatyytrcccarcrcwcacacrccgctgctarccycataccccgaaccaaccaaaccccaaagacaccccccacagtttatgtagcttacctcctcaaagcaatacactgaaaatgtttagacgggctcacatcaccccataaacaaataggtttggtcctagcctttctattagctcttagtaagattacacatgcaagcatccccrttccagtgagttcaccctctaaatcaccacgatcaaaaggaacaagcatcaagcacgcagcaatgcagctcaaaasgcttagcctagccacacccccacgggaaacagcagtgattaacctttagcaataaacgaaagtttaactaasctatactaaccccagggttggtcaatttcgtgccagccaccgcggtcacacrattaacccaagtcaatagaagccggcgtaaagagtgttttagatcaccccctccccaataaagctaaaactcacctgagttgtaaaaaactccagttgacacaaaatagactacgaaagtggctttaacatatctgaacacacaatagctaagacccaaactgggattagataccccactatgcttagccctaaacctcaacagttaaatcaacaaaactgctcgccagaacactacgagccacagcttaaaactcaaaggacctggcggtgcttcatayccctctagaggagcctgttctgtaatcgataaaccccgatcaacctcaccacctcttrctcagcctatataccgccatcttcagcaaaccctgatgaaggctacaaagtaagcgcaagtacccacgtaaagacgttaggtcaaggtgtagcccatgaggtggcaagaaatgggctacattttctaccccagaaaactacgatagcccttatgaaacttaagggtcgaaggtggatttagcartaaactaagagtagagtgcttagttgaacagggccctgaagcgcgtacacaccgcccgtcaccctcctcaagtatacttcaaaggacatttaactaaaacccctacgcatttatatagaggagacaagtcgtaacatggtaagtgtactggaaagtgcacttggacgaaccagagtgtagcttaacacaaagcacccaacttacacttaggagatttcaacttaacttgaccgctctgagctaaacctagccccaaacccaytccaccttactaccaracaaccttarccaaaccatttacccaaataaagtataggcgatagaaattgwaaccyggcgcaatagatatagtaccgcaagggaaagatgaaaaattatarccaagcataatatagcaaggactaacccctrtaccttctgcataatgaattaactagaaataactttgcaargagarccaaagctaagacccccgaaaccagacgagctacctaagaacagctaaaagagcacacccgtctatgtagcaaaatagtgggaagatttataggtagaggcgacaaacctaccgagyctggtgatagctggttgtccaagatagaatcttagttcaactttaaatttrcccacagakccctctaaatccccttgtaaatttaactgttagtccaaagaggaacagctctttggacactaggaaaaaaccttgtagagagagtaaaaaatttaacacccatagtaggcctaaaagcagccaccaattaagaaagcgttcaagctcaacacccactacctaaaaaatcccaaacatataactgaactcctyryayccaattggaccaatctatyaccctatagaagaactaatgttagtataagtaacatgaaaacattctcctccgcataagcctgcgtcagayyaaaayaytgaactgacaattaacagcccaatatctayaatcaaccaacaagtcattattaccctcactgtcaacccaacacaggcatgctcataaggaaaggttaaaaaaagtaaaaggaactcggcaaatcttaccccgcctgtttaccaaaaacatcacctctagcatcaccagtattagaggcaccgcctgcccagtgacacatgtttaacggccgcggtaccctaaccgtgcaaaggtarcataatcacttgttccttaaatagggacctrtatgaatggctccacgagggttcagctgtytcttacttttaaccagtgaaattgayctgccygtgaagaggcgggcatracacagcaagacgagaagaccctatggagctttaatttattaatgcaaacagtayctaacaaacccacaggtcctaaactaccaaacctgcattaaaaatttcggttggggcgacctcggagcagaacccaacctccgagcagtacatgcyaagacttcaccagtcaaagcgaactacyatactcaattgatccaataacttgaccaacggaacaagttaycctagggataacagcgcaatyctaytctagagtccatatcaacaatagggtttacgacctcgatgttggatcaggacatcccratrgtgcagccgctattaaaggttcrtttrttcaaygattaaagtcctacgtgatctgagttcagaccggagtaatccaggtcggtttctatctacttcaaattcctccctgtacgaaaggacaagagaaataaggcctacttcacaaagcgccttcccccgtaaatgatatcatctcaacttagtattatacccacacccacccaagaacagggtttgttaagatggcagagcccggtaatcgcataaaacttaaaactttacagtcagaggttcaattcctcttcttaacaacayacccatggccaacctcctactcctcattgyacccattctartcgcaatggcattcctaatgcttaccgaacgaaaaattctaggcyatayacaactacgcaaaggccccaacgttgtaggcccctacgggctactacaacccttcgctgacgccataaaactcttcaccaargagcccctaaaacccgccrcatctacmatcaccctctacatcaccgccccgaccttagctctcaccatcgctcttctactatgaacccccctccccatacccaaccccytggtyaacctcaacctaggcctcctatttattctagccacctctagcctagccgtttactcaatcctytgatcaggrtgagcatcaaactcaaactacrccctratcggcgcactgcgagcagtagcccaaacaatctcatatgaagtcaccctagccatcattctactatcaacattactaataagtggctcctttaacctctccacccttatcacaacacaagaacacctctgattactcctgccatcatgacccttggccataatatgatttatctccacactagcagagaccaaccgaacccccttcgaccttgycgaaggggagtccgaactagtctcaggcttcaacatcgaatacgccgcaggccccttygcyctattcttcatagccgaatacayaaacattattataataaacaccctyaccactacaatcttcctaggaacaacatatgacgcactctcccctgaactctacacaacatattttgtcaccaagaccctacttctaacctccctgttcttatgaattcgaacagcatacccccgattccgctacgaccaactcatacacctcctatgaaaaaacttyctaccactcaccctagcattacttatatgayrtgtctccatacccattacaatytccagcattccccctcaaacctaagaaatatgtctgataaaagagttactttgatagagtaaataataggagcttaaacccccttatttctaggactatgagaatcgaacccatccctgagaatccaaaattctccgtgccacctatcacaccccatcctaaagtaaggtcagctaaayaagctatcgggcccataccccgaaaatgttggttatacccttcccgtactaattaatcccctggcccaacccgtcatctactctaccatctttgcaggcacactcatcacagcgctaagctcgcactgattttttacctgagyaggcctaraaataaacatrctagcttttaytccagttctaaccaaaaaaataaaccctcgttccacagaagctgccatcaagtayttcctcacrcaagcaaccgcatccataatccttctaatagctatcctcttcaacaayatactctccggayaatgarccataaccaayaytaccaatcaatactcatcattaataatcataatagctatagcaataaaactrggaatagccccctttcacttctgagtcccagaggttacycaaggcacccctctgacatccggcctgcttcttctcayatgacaaaaactagcccccatctcaatyatataccaaatctctccctcactaracgtaagccttctcctcactctctcaatcttatycatcatagcaggcagttgaggtggattaaaccaaacccagctacgcaaaatcttagcatactcctcaattacccacataggatgrataatagcarttctaccgtacaaccctaacataaccattcttaatttaactatttatattatcctractactaccgcattcctactactcaacttaaactccagcaccacraccctactactatctcgcacctgaaayaagctaacatgactaacacccttrattccatccaccctyctctccctaggaggcctgcccccgctaaccggctttttgcccaaatgggccattatcgaagaattcacaaaaaacaatagcctcatyatccccaccatyatagccaccatcaccctccttaacctctacttctacctacgcctaatctactccacctyaatcacactactccccatatctaacaacgtaaaaataaaatgacagtttgaayatacaaaacccacccyattcctccccacactyatcgcccttaccacgctactcctacctatctccccttttatactaataatcttatagaaatttaggttaaatacagaccaagagccttcaaagccctcagtaagttgcaatacttaatttctgtaacagctaaggaytgcaaaaccccactctgcatcaactgaacgcaaatcagcyactttaattaagctaarccctyrctagacyaatgggacttaaayccacaaacacttagttaacagctaagcaccctaatcaactggcttcaatctacttctcccgccgccgggaaaaaaggcgggagaagccccggcaggtttgaagctgcttcttcgaatttgcaattcaatatgaaaatcacctcggagctggtaaaaagaggcctaacccctgtctttagatttacagtccaatgcttcactcagycattttacctcaccyccactgatgttcgccgaccgttgactattctctacaaaccacaaagacattggaacactatacctattattcggcgcatgagctggrrtcctaggcacagcyctaagcctcyttattcgagccgagctggrccagccagrcaaycttctrggtaacgaccayatctacaacgttatcgtcacagcccatgcatttgtaataatcttcttcatagtaatacccatcataatcggaggctttggcaactgaytagttcccctaataatcggtgcccccgatatggcgtttccccgcataaacaacataagcttctgactcttaycyccytctctcctactcctgctcgcatctgctatagtggaggccggagcaggaacaggttgaacagtctaccctcccttagcagggarctactcycaccctggagcctccgtagacctaaccatcttctccttacacctagcaggtgtctcctctatcttagrggccatcaatttcatcacaacaattatcaatataaaaccccctgccataacccaataccaaacgcccctcttcgtctgatccgtcctaatcacagcagtcctacttctcctatctctcccagtcctagctgctggcatcactatactactaacagaccgcaacctyaacaycacyttcttcgaccccgccggaggargagaccccattctataccaacacctattctgatttttcggtcaccctgaagtttatattcttaycctaccaggcttcggaataatctyccatattgtaacttactaytccgraaaaaaagaaccatttggatacataggtatggtctgagctatgatatcaattggcttcctagggtttatcgtgtgagcacaccayatatttacagtaggaatagacgtagacacacgagcatatttcacctccgcyaccataatcatcgctatccccaccggcgtcaaagtatttagctgactcgccacactccacggaagcaatatgaaatgatctgctrcagtgctctgagccctaggattcatctttcttttcaccgtrggtggcctgactggcattgtattagcaaactcatcrctagacatcgtactacaygacacrtactacgttgtagcycacttccactatgtcctatcaataggrgctrtatttgccatcataggaggcttcattcactgatttcccctattctcaggctacaccctagaccaaacctacgccaaaatccatttcrctatcatattcaycggcgtaaatctaactttcttcccrcaacactttctcggcctatccggaatgccccgacgttactcggactaccccgatgcatacaccacatgaaayatcctatcatctgtaggctcattcatttctctaacagcagtaatattaataaytttcatgatttgagaagccttcgcttcgaagcgaaaagtcctaatagtagaagaaccctccataaacctggagtgactayatggatgccccccacccyaccayacattcgaagaacccgtatacataaaatctagacaaaaaaggaaggaatcgaaccccccaaagytggtttcaagccaaccccatggcctccatgactttttcaaaaagrtattagaaaaaccatttcataactttgtcaaagttaaattataggctaaatcctatatatcttaatggcacatgcagcgcaagtaggtctacaagacgctacttcccctatcatagaagagcttatcacctttcatgatcacgccctcataatcattttccttatctgcttcctagtcctgtatgcccttttcctaacactcacaacaaaactaactaatactaacatctcagaygctcagraaatrgaaaccgtctgaactatcctgcccgccatcatcctagtcctcatcgycctcccatccctacgcatcctttacataacagacgaggtcaacgatccctcycttaccatcaaatcaattggccaccaatgrtactgaacctacgagtacaccgactacggcggactaatcttcaactcctacatacttcccccattattcctagaaccaggcgacctgcgactccttgacgttgacaatcgagtagtactcccgattgaarcccccattcgtataataattacatcacaagacgtcttrcactcatgagctgtccccacattaggcttaaaaacagatgcaattcccggaygtctaaaccaaaccaytttcaccgctacacgaccgggggtatactacggtcaatgctctgaaatctgtggagcaaaccacagtttcatgcccatcgtcctagaattaattcccctaaaaatctttgaaatrgggcccgtatttaccctatagyaccccctctaccccctctagagcccactgtaaagctaacttagcattaaccttttaagttaaagattaagagaaccaacacctctttacagtgaaatgccccaactaaatactaccgtatggcccaccataattacccccatactccttacactattcctcatcacccaactaaaaatattaaacacaaactaccacytacctccctcaccaaagcccataaaaataaaaaattataacaaaccctgagaaccaaaatgaacgaaaatctgttcgcttcattcattgcccccacaatcctaggcctacccgccgcagtactgatcattctatttccccctctattratccccacctccaaatatctcatcaacaaccgactaatyaccacccaacaatgactaatcaaactaacctcaaaacaaatratarccatacacaacactaarggacgaacctgatctcttatactagtatccttaatcatttttattgccacaactaacctcctcggactcctgcctcactcatttacaccaaccacccaaytatctataaacctagccatggccatccccttatgagcgggcacagtgattataggctttcgctctaagattaaawatgccctagyccacttcttaccacaaggcacacctacaccccttatccccatactagttattatcgaaaccatcagcctactcattcaaccaatagccctggccgtacgcctaaccgctaacattactgcaggccacctactcatgcacctaattggaagcrccaccctagcaatatcaaccattaaccttccctctacrcttatcatcttcacaattctaattctactgactatcctrgaaatcgctgtcgccttaatccaagcctacrttttcacacttctagtaagcctctacctgcacgacaacacataatgacccaccaatcacatgcctatcatatagtaaaacccagcccatgacccctaacaggggccctctcagccctcctaatgacctccggcctagccatgtgatttcvcttccactccatarcgctcctcatactaggcctactaaycaacacactaaccatataccaatgatggcgcgatgtaacacgagaaagcacayaccaaggycaccayacaccacctgtccaaaaaggccttcratacgggataatcctatttattacctcagaartttttttcttcgcaggatttttctragccttttaccactccagcctagcccctaccccccaaytaggaggrcactgrccccyaacargcatcacccrgctaaatcccctagaastcccactcctaaacacatccgtattactcgcatcagragtatcaatcacctgagctcaccatagtctaatagaaarcaaccgaaaccaaataattcaagcactgytyattacaattttactgggyctctattttaccctcctacaagcctcagagtacttcgagtctcccttcacyatttccgacgrcatctacggctcaacattttttgtagccacaggcttccacggacttcacgtcattattggctcaactttcctcactatctgcttcatccgccaactaatatttcactttacatccaaacaycactttggcttcgaagccgccgcctgatactggcattttgtagatgtggtttgactatttctgtatgtctccatctattgatgagggtcttactcttttagtataaatagtaccgttaacttccaattaactagttttgacaacattcaaaaaagagtaataaacttcgccttaattttaataatcaacaccctcctagccttactactaataattattacattttgactaccacaactcaacrgctacatagaaaaatccaccccttacgagtgcggcttcgaccctatatcccccgcccgcgtccctttctccataaaattcttcttagtagctattaccttcttattatttgatctagaaattgccctccttttacccctaccatgagccctrcaaacaactaacctgccactaatagttatgtcatccctcttattaatcaycatcctagcyctaagtctggcctatgagtgactacaaaaaggattagactgaaccgaattggtatatagtttaaacaaaacgaatgatttcgaytcattaaattatgatratcatatytaccaaatgcccctcatttacataaatattatactagcatttaccatctcacttctaggaatactagtatatcgctcacacctcatrtcctccctactatgcctagaaggaataatactatcgctgttcattatagctactctcataaccctcaacacccactccctcttagccaatattgtgcctattgccatactagtctttgccgcctgcgargcagcrgtrggcctagccctactagtctcaatctccaacacatatggcctagactacgtacataacctaaacctmctccaatgctaaaactaatcgtcccaacaattatattactaccactgacatgactytccaaaaarcacataatttgaatcaacacaaccacccacagcctaattattagcatcatcccyctactattyttyaaccaaatcaacaacaacctatttagctgttccccaaccttttcctccgaccccctaayaacccccctccyaatactaactacctgrctyctrcccctcacaatcatggcaagccracgccacttatycagtgaaccaytatcacgaaaaaaactctacctctctatactaatctccctacaartctccttaattatarcattcacagccacagaactaatcatattytatatcttcttcgaaaccacacttatccccaccttggctatcatcacccgatgaggcaaccagycakaacgcctgaacgcargcacatacttcctattctacaycctagtaggctcccttcccctactcatcgcactratttacactcacaacaccctaggctcactaaacattctactactcacyctcactgcccaagaactatcaaactcctgagcyaacarcttaatatgactarcttayacaatagcttttatagtaaaratacctctttacggactccacttatgactccctaaagcccatrtcgaagcccccatcgctgggtcaatagtacttgccgcagtactcttaaaactaggcggctatggtataatacgcctcacactcattctcaaccccctgacaaaacacatagcctaccccttccttgtactatccctatgaggcataattataacaagctccatctgcctacgacaaacagacctaaaatcgctcattgcatactcttcaatcagccacatagccctygtagtaacagccattctcatccaaaccccctgaagcttcaccggcgcagtcattctcataatcgcccacggrcttacatcctcattactattctgcctagcaaactcaaactacgaacgcactcacagtcgcatcataatcctctctcaaggacttcaaactctrctcccactaatagctttttgatgacttctagcaagcctcrctaayctcgccytaccccccactattaayctactgggagaactctctgtgctagyaaccacrttctcctgatcaaatatcactctcctacttacaggactcaacatactagtcacagccctatactccctctacatatttaccacaacacaatggggctyrctcacccaccacattaacaacataaaaccctcattcacacgagaaaacaccctcatgttcatacacctatcccccattctcctcctatccctcaaccccgacatcattaccgggttttcctcttgtaaatatagtttaaccaaaacatcagattgtgaatctgacaacagaggcttacgaccccttatttaccgagaaagctcacaagaactgctaactcatgcccccatgtctaacaacatggctttctcaacttttaaaggataacagctatccattggtcttaggccccaaraattttggtgcaactccaaataaaagtaataaccatgcacactactataaccaccctaaccctracttccctaattccccccatccttaccaccctcgttaaccctaacaaaaaaaactcatacccccattatgtaaaatccattgtcgcatccacctttattatcagtctcttccccacaacwatattcatgtgcctagaccaagaagttattatctcgaactgacactgagccacaacccaaacaacccagctctccctaagcttcaaactagactacttctccataatattcatccctgtagcattgttcgtyacatggtcmatcatagaattctcactgtgrtatataaactcagacccaaacattaatcagttcttcaaatatctactcatcttcctaattaccatactaatcttagttaccgctaacaacctattccaactgttcatcggctgagagggcgtaggaattatatccttcttgctcatcagttgatgrtacgcccgagcagatgccaacacagcagccattcaagcaatcctatacaaccgtatcggcgatatcggtttcatcctcgccttagcatgatttatcctacactccaactcatgagacccacaacaaatagcccttctaaacgctaatcyaagcctcaccccactactaggcctcctcctagcagcagcaggcaaatcagcccaattaggtctccacccctgactcccctcagccatagaaggccccaccccagtctcagccctactccrctcaagcacwatagttgtagcaggartcttcytactcatccgcttccaccccctagcagaaaatagcccactaatccaaactctaacactatgcttaggcgctatcaccactctgttcgcagcagtctgcgcycttacacaaaatgacatcaaaaaaatcgtagccttctccacttcaagtcaactaggactcataatagtyacaatcggcatcraccaaccacacctagcattcctgcacatctgtacccacgccttcttcaaagccatactatttatrtgctccggrtccatcatccacaaccttaacaatgaacargatattcgaaaaataggaggactactcaaaacyatacytctcacttcaacctccctcaccattggcagcytagcattrgcaggaayacytttcctcacaggtttctaytccaaagaccacatcatcgaaacygcaaayatatcatacacaaacgcctgagccctrtctattactytcatcrctacctccctgacaagcgcctatagcactygaataatycttytcaccctaayagrtcrrcctcgcttcccyrcccytactaacattaacgaaaayaacccyaccctaytaaaccccattaaacgcctrrcarycggaagcctattygcaggrttyctcattacyaacarcatttcccccrcatcccycttccaaacaacaatccccctyyacctaaaactcacagycctcgctgtcactttcctaggacttctaacagcccyagacctcaactacctaaccaacaaacttaaaataaaatmcccactaygcacattttatttctccaacatrctcggattctaccctagcatcrcacaccgcacaatcccctatctaggccttcttacgagccaaaacctgcccctactcctcctagacctaacctgactagaaaagctattaccyaaaacaatttcacagcacyaaatctccacctccatcatcacctcaacccaaaaaggcataattaaactttacttcctctctttcttcttcccactcatcctaaccctacwcctratcacataacctattcccccgagcaatytcaattacaayatayacaccaacaaacaatgttcarccagtaactactactartcaacgcccatartcatacaaagcccccgcaccaataggatcctcccgaatcaaccctgayccctctccttcataaattattcagcttcctacactattaaagtttaccacaaccaccaccccatcatactctttcacccacagcaccaatcctacctccatcgctaaccccactaaaacactcaccaagacctcaacccctgacccccatgcctcaggatactcctcaatagccatcgctgtagtatatccaaagacaaccatcattccccctaaataaattaaaaaaactattaaacccatataacctcccccaaaattcagaataataacacacccgaccacaccgctaacaatcaatactaaacccccataaataggagaaggcttagaagaaaaccccacaaaccccattactaaacccacactcaacagaaacaaagcatacatcattattctcgcacggactacaaccacgaccaatgatatgaaaaaccatcgttgtatttcaactacaagaacaccaatgaccccaatacgcaaaactaaccccctaataaaattaattaaccactcattcatcgacctccccaccccatccaacatctccgcatgatgaaacttcggctcactccttggcgcctgcctgatcctccaaatcaccacaggactattcctrgccrtgcactactcaccaracgcctcaaccgccttttcatcaatcgcccacatcactcgagacgtaaattatggctgaatcatccgctaccttcacgccaatggcgcctcaatattctttatctgcctcttcctacacatcggrcgaggcctatattacggatcatttctctactcagaaacctgaaacatcggcattatcctcctgcttgcaacyatagcaacagccttcataggctatgtcctcccgtgaggccaaatatyattctgaggggccacagtaattacaaacttactatccgccatcccatacattgggrcagacctagttcaatgaatctgaggrggctactcagtagacagtccyaccctcacacgattctttacytttcacttcatcttryccttyattattgcagccctaryaacactccacctcctattyttgcacgaaacrggatcaaacaaccccctaggaatyacctyccattccgataaaatcaccttccacccttactacacaatcaaagrcgccctcggcttacttctcttcmttctctccttaatgacattaacactattctcaccagacctcctaggcgacccagacaattataccctagcyaryyccttaaacacccctccccacatcaagcccraatgatatttcctattcgcctacacaattytccgatccgtccctaacaarctaggaggcgtccttgccctattactatccatcctcatcctagcaataatccccatcctccayatatccaaacaacaaagcataayatttygcccamtaakccaatcactttattgactcctagccgcagacctcctcattctaacctgaatcgraggacaaccagtaagctacccttttaccatcattggacaagtagcatccrtactatacttcacaacaatccyaatcctaataccaactatctccctaattgaraacaaaatactcaaatggscctgyccttgtagtataaahtartacaccagtcttgtaaaccrragatgaaaacctttttccaaggacaaatcagagaaaaagtctttaactccaccattagcacccaaagctawgattctaatttaaactattctctgttctttcatggggaagcagatttgrgtrccacccaagtaytgaytyacccatcaacaaccgctatgtatytygtacattactgccagycaccatgaatattgyacrgtacyataaatacttgacyacctrtagtacataraaacccaayccacatcaaaaycyccyycycatgcttacaagcaagyacagcaatcaaccyyyaactatcacrcatyaactgcarctccaaagycacccctcacccaytaggataycracaaacctayyyryyyyyaacakyacatagyacataaanycattyaccgtacatagcacatyasagtcaaayyyyytctygyccccatgratgacccccctcagatagrrgtcccttrrccaccatcctccgtgaaatcaatatcccgyacaagagtgctactctcctcgctccgggcccataayacttgggggyagctaaagtgaactgtatccgacatctggttcctacttyagggycataaaryctaaatagcycacacgytccccttaaataagacatcacgatg

SEQ ID NO: 103 - DNA, 16567 bp, Homo sapiens mitochondrial DNA
  deletion (248)..(248): 248DEL A
gatcacaggtctatcaccctattaaccactcacgggagctctccatgcatttggtattttcgtctggggggtatgcacgcgatagcattgcgagacgctggagccggagcaccctatgtcgcagtatctgtctttgattcctgcctcatcctattatttatcgcacctacgttcaatattacaggcgaacatacttactaaagtgtgttaattaattaatgcttgtaggacataataataacaattgatgtctgcacagccactttccacacagacatcataacaaaaaatttccaccaaaccccccctcccccgcttctggccacagcacttaaacacatctctgccaaaccccaaaaacaaagaaccctaacaccagcctaaccagatttcaaattttatcttttggcggtatgcacttttaacagtcaccccccaactaacacattattttcccctcccactcccatactactaatctcatcaatacaacccccgcccatcctacccagcacacacacaccgctgctaaccccataccccgaaccaaccaaaccccaaagacaccccccacagtttatgtagcttacctcctcaaagcaatacactgaaaatgtttagacgggctcacatcaccccataaacaaataggtttggtcctagcctttctattagctcttagtaagattacacatgcaagcatccccgttccagtgagttcaccctctaaatcaccacgatcaaaaggaacaagcatcaagcacgcagcaatgcagctcaaaacgcttagcctagccacacccccacgggaaacagcagtgattaacctttagcaataaacgaaagtttaactaagctatactaaccccagggttggtcaatttcgtgccagccaccgcggtcacacgattaacccaagtcaatagaagccggcgtaaagagtgttttagatcaccccctccccaataaagctaaaactcacctgagttgtaaaaaactccagttgacacaaaatagactacgaaagtggctttaacatatctgaacacacaatagctaagacccaaactgggattagataccccactatgcttagccctaaacctcaacagttaaatcaacaaaactgctcgccagaacactacgagccacagcttaaaactcaaaggacctggcggtgcttcatatccctctagaggagcctgttctgtaatcgataaaccccgatcaacctcaccacctcttgctcagcctatataccgccatcttcagcaaaccctgatgaaggctacaaagtaagcgcaagtacccacgtaaagacgttaggtcaaggtgtagcccatgaggtggcaagaaatgggctacattttctaccccagaaaactacgatagcccttatgaaacttaagggtcgaaggtggatttagcagtaaactaagagtagagtgcttagttgaacagggccctgaagcgcgtacacaccgcccgtcaccctcctcaagtatacttcaaaggacatttaactaaaacccctacgcatttatatagaggagacaagtcgtaacatggtaagtgtactggaaagtgcacttggacgaaccagagtgtagcttaacacaaagcacccaacttacacttaggagatttcaacttaacttgaccgctctgagctaaacctagccccaaacccactccaccttactaccagacaaccttagccaaaccatttacccaaataaagtataggcgatagaaattgaaacctggcgcaatagatatagtaccgcaagggaaagatgaaaaattataaccaagcataatatagcaaggactaacccctataccttctgcataatgaattaactagaaataactttgcaaggagagccaaagctaagacccccgaaaccagacgagctacctaagaacagctaaaagagcacacccgtctatgtagcaaaatagtgggaagatttataggtagaggcgacaaacctaccgagcctggtgatagctggttgtccaagatagaatcttagttcaactttaaatttgcccacagaaccctctaaatccccttgtaaatttaactgttagtccaaagaggaacagctctttggacactaggaaaaaaccttgtagagagagtaaaaaatttaacacccatagtaggcctaaaagcagccaccaattaagaaagcgttcaagctcaacacccactacctaaaaaatcccaaacatataactgaactcctcacacccaattggaccaatctatcaccctatagaagaactaatgttagtataagtaacatgaaaacattctcctccgcataagcctgcgtcagattaaaacactgaactgacaattaacagcccaatatctacaatcaaccaacaagtcattattaccctcactgtcaacccaacacaggcatgctcataaggaaaggttaaaaaaagtaaaaggaactcggcaaatcttaccccgcctgtttaccaaaaacatcacctctagcatcaccagtattagaggcaccgcctgcccagtgacacatgtttaacggccgcggtaccctaaccgtgcaaaggtagcataatcacttgttccttaaatagggacctgtatgaatggctccacgagggttcagctgtctcttacttttaaccagtgaaattgacctgcccgtgaagaggcgggcataacacagcaagacgagaagaccctatggagctttaatttattaatgcaaacagtacctaacaaacccacaggtcctaaactaccaaacctgcattaaaaatttcggttggggcgacctcggagcagaacccaacctccgagcagtacatgctaagacttcaccagtcaaagcgaactactatactcaattgatccaataacttgaccaacggaacaagttaccctagggataacagcgcaatcctattctagagtccatatcaacaatagggtttacgacctcgatgttggatcaggacatcccgatggtgcagccgctattaaaggttcgtttgttcaacgattaaagtcctacgtgatctgagttcagaccggagtaatccaggtcggtttctatctacttcaaattcctccctgtacgaaaggacaagagaaataaggcctacttcacaaagcgccttcccccgtaaatgatatcatctcaacttagtattatacccacacccacccaagaacagggtttgttaagatggcagagcccggtaatcgcataaaacttaaaactttacagtcagaggttcaattcctcttcttaacaacatacccatggccaacctcctactcctcattgtacccattctaatcgcaatggcattcctaatgcttaccgaacgaaaaattctaggctatatacaactacgcaaaggccccaacgttgtaggcccctacgggctactacaacccttcgctgacgccataaaactcttcaccaaagagcccctaaaacccgccacatctaccatcaccctctacatcaccgccccgaccttagctctcaccatcgctcttctactatgaacccccctccccatacccaaccccctggtcaacctcaacctaggcctcctatttattctagccacctctagcctagccgtttactcaatcctctgatcagggtgagcatcaaactcaaactacgccctgatcggcgcactgcgagcagtagcccaaacaatctcatatgaagtcaccctagccatcattctactatcaacattactaataagtggctcctttaacctctccacccttatcacaacacaagaacacctctgattactcctgccatcatgacccttggccataatatgatttatctccacactagcagagaccaaccgaacccccttcgaccttgccgaaggggagtccgaactagtctcaggcttcaacatcgaatacgccgcaggccccttcgccctattcttcatagccgaatacacaaacattattataataaacaccctcaccactacaatcttcctaggaacaacatatgacgcactctcccctgaactctacacaacatattttgtcaccaagaccctacttctaacctccctgttcttatgaattcgaacagcatacccccgattccgctacgaccaactcatacacctcctatgaaaaaacttcctaccactcaccctagcattacttatatgatatgtctccatacccattacaatctccagcattccccctcaaacctaagaaatatgtctgataaaagagttactttgatagagtaaataataggagcttaaacccccttatttctaggactatgagaatcgaacccatccctgagaatccaaaattctccgtgccacctatcacaccccatcctaaagtaaggtcagctaaataagctatcgggcccataccccgaaaatgttggttatacccttcccgtactaattaatcccctggcccaacccgtcatctactctaccatctttgcaggcacactcatcacagcgctaagctcgcactgattttttacctgagtaggcctagaaataaacatgctagcttttattccagttctaaccaaaaaaataaaccctcgttccacagaagctgccatcaagtatttcctcacgcaagcaaccgcatccataatccttctaatagctatcctcttcaacaatatactctccggacaatgaaccataaccaatactaccaatcaatactcatcattaataatcataatagctatagcaataaaactaggaatagccccctttcacttctgagtcccagaggttacccaaggcacccctctgacatccggcctgcttcttctcacatgacaaaaactagcccccatctcaatcatataccaaatctctccctcactaaacgtaagccttctcctcactctctcaatcttatccatcatagcaggcagttgaggtggattaaaccaaacccagctacgcaaaatcttagcatactcctcaattacccacataggatgaataatagcagttctaccgtacaaccctaacataaccattcttaatttaactatttatattatcctaactactaccgcattcctactactcaacttaaactccagcaccacgaccctactactatctcgcacctgaaacaagctaacatgactaacacccttaattccatccaccctcctctccctaggaggcctgcccccgctaaccggctttttgcccaaatgggccattatcgaagaattcacaaaaaacaatagcctcatcatccccaccatcatagccaccatcaccctccttaacctctacttctacctacgcctaatctactccacctcaatcacactactccccatatctaacaacgtaaaaataaaatgacagtttgaacatacaaaacccaccccattcctccccacactcatcgcccttaccacgctactcctacctatctccccttttatactaataatcttatagaaatttaggttaaatacagaccaagagccttcaaagccctcagtaagttgcaatacttaatttctgtaacagctaaggactgcaaaaccccactctgcatcaactgaacgcaaatcagccactttaattaagctaagcccttactagaccaatgggacttaaacccacaaacacttagttaacagctaagcaccctaatcaactggcttcaatctacttctcccgccgccgggaaaaaaggcgggagaagccccggcaggtttgaagctgcttcttcgaatttgcaattcaatatgaaaatcacctcggagctggtaaaaagaggcctaacccctgtctttagatttacagtccaatgcttcactcagccattttacctcacccccactgatgttcgccgaccgttgactattctctacaaaccacaaagacattggaacactatacctattattcggcgcatgagctggagtcctaggcacagctctaagcctccttattcgagccgagctgggccagccaggcaaccttctaggtaacgaccacatctacaacgttatcgtcacagcccatgcatttgtaataatcttcttcatagtaatacccatcataatcggaggctttggcaactgactagttcccctaataatcggtgcccccgatatggcgtttccccgcataaacaacataagcttctgactcttacctccctctctcctactcctgctcgcatctgctatagtggaggccggagcaggaacaggttgaacagtctaccctcccttagcagggaactactcccaccctggagcctccgtagacctaaccatcttctccttacacctagcaggtgtctcctctatcttaggggccatcaatttcatcacaacaattatcaatataaaaccccctgccataacccaataccaaacgcccctcttcgtctgatccgtcctaatcacagcagtcctacttctcctatctctcccagtcctagctgctggcatcactatactactaacagaccgcaacctcaacaccaccttcttcgaccccgccggaggaggagaccccattctataccaacacctattctgatttttcggtcaccctgaagtttatattcttatcctaccaggcttcggaataatctcccatattgtaacttactactccggaaaaaaagaaccatttggatacataggtatggtctgagctatgatatcaattggcttcctagggtttatcgtgtgagcacaccatatatttacagtaggaatagacgtagacacacgagcatatttcacctccgctaccataatcatcgctatccccaccggcgtcaaagtatttagctgactcgccacactccacggaagcaatatgaaatgatctgctgcagtgctctgagccctaggattcatctttcttttcaccgtaggtggcctgactggcattgtattagcaaactcatcactagacatcgtactacacgacacgtactacgttgtagcccacttccactatgtcctatcaataggagctgtatttgccatcataggaggcttcattcactgatttcccctattctcaggctacaccctagaccaaacctacgccaaaatccatttcactatcatattcatcggcgtaaatctaactttcttcccacaacactttctcggcctatccggaatgccccgacgttactcggactaccccgatgcatacaccacatgaaacatcctatcatctgtaggctcattcatttctctaacagcagtaatattaataattttcatgatttgagaagccttcgcttcgaagcgaaaagtcctaatagtagaagaaccctccataaacctggagtgactatatggatgccccccaccctaccacacattcgaagaacccgtatacataaaatctagacaaaaaaggaaggaatcgaaccccccaaagctggtttcaagccaaccccatggcctccatgactttttcaaaaaggtattagaaaaaccatttcataactttgtcaaagttaaattataggctaaatcctatatatcttaatggcacatgcagcgcaagtaggtctacaagacgctacttcccctatcatagaagagcttatcacctttcatgatcacgccctcataatcattttccttatctgcttcctagtcctgtatgcccttttcctaacactcacaacaaaactaactaatactaacatctcagacgctcaggaaatagaaaccgtctgaactatcctgcccgccatcatcctagtcctcatcgccctcccatccctacgcatcctttacataacagacgaggtcaacgatccctcccttaccatcaaatcaattggccaccaatggtactgaacctacgagtacaccgactacggcggactaatcttcaactcctacatacttcccccattattcctagaaccaggcgacctgcgactccttgacgttgacaatcgagtagtactcccgattgaagcccccattcgtataataattacatcacaagacgtcttgcactcatgagctgtccccacattaggcttaaaaacagatgcaattcccggacgtctaaaccaaaccactttcaccgctacacgaccgggggtatactacggtcaatgctctgaaatctgtggagcaaaccacagtttcatgcccatcgtcctagaattaattcccctaaaaatctttgaaatagggcccgtatttaccctatagcaccccctctaccccctctagagcccactgtaaagctaacttagcattaaccttttaagttaaagattaagagaaccaacacctctttacagtgaaatgccccaactaaatactaccgtatggcccaccataattacccccatactccttacactattcctcatcacccaactaaaaatattaaacacaaactaccacctacctccctcaccaaagcccataaaaataaaaaattataacaaaccctgagaaccaaaatgaacgaaaatctgttcgcttcattcattgcccccacaatcctaggcctacccgccgcagtactgatcattctatttccccctctattgatccccacctccaaatatctcatcaacaaccgactaatcaccacccaacaatgactaatcaaactaacctcaaaacaaatgataaccatacacaacactaaaggacgaacctgatctcttatactagtatccttaatcatttttattgccacaactaacctcctcggactcctgcctcactcatttacaccaaccacccaactatctataaacctagccatggccatccccttatgagcgggcacagtgattataggctttcgctctaagattaaaaatgccctagcccacttcttaccacaaggcacacctacaccccttatccccatactagttattatcgaaaccatcagcctactcattcaaccaatagccctggccgtacgcctaaccgctaacattactgcaggccacctactcatgcacctaattggaagcgccaccctagcaatatcaaccattaaccttccctctacacttatcatcttcacaattctaattctactgactatcctagaaatcgctgtcgccttaatccaagcctacgttttcacacttctagtaagcctctacctgcacgacaacacataatgacccaccaatcacatgcctatcatatagtaaaacccagcccatgacccctaacaggggccctctcagccctcctaatgacctccggcctagccatgtgatttcacttccactccataacgctcctcatactaggcctactaaccaacacactaaccatataccaatgatggcgcgatgtaacacgagaaagcacataccaaggccaccacacaccacctgtccaaaaaggccttcgatacgggataatcctatttattacctcagaagtttttttcttcgcaggatttttctgagccttttaccactccagcctagcccctaccccccaattaggagggcactggcccccaacaggcatcaccccgctaaatcccctagaagtcccactcctaaacacatccgtattactcgcatcaggagtatcaatcacctgagctcaccatagtctaatagaaaacaaccgaaaccaaataattcaagcactgcttattacaattttactgggtctctattttaccctcctacaagcctcagagtacttcgagtctcccttcaccatttccgacggcatctacggctcaacattttttgtagccacaggcttccacggacttcacgtcattattggctcaactttcctcactatctgcttcatccgccaactaatatttcactttacatccaaacatcactttggcttcgaagccgccgcctgatactggcattttgtagatgtggtttgactatttctgtatgtctccatctattgatgagggtcttactcttttagtataaatagtaccgttaacttccaattaactagttttgacaacattcaaaaaagagtaataaacttcgccttaattttaataatcaacaccctcctagccttactactaataattattacattttgactaccacaactcaacggctacatagaaaaatccaccccttacgagtgcggcttcgaccctatatcccccgcccgcgtccctttctccataaaattcttcttagtagctattaccttcttattatttgatctagaaattgccctccttttacccctaccatgagccctacaaacaactaacctgccactaatagttatgtcatccctcttattaatcatcatcctagccctaagtctggcctatgagtgactacaaaaaggattagactgaaccgaattggtatatagtttaaacaaaacgaatgatttcgactcattaaattatgataatcatatttaccaaatgcccctcatttacataaatattatactagcatttaccatctcacttctaggaatactagtatatcgctcacacctcatatcctccctactatgcctagaaggaataatactatcgctgttcattatagctactctcataaccctcaacacccactccctcttagccaatattgtgcctattgccatactagtctttgccgcctgcgaagcagcggtgggcctagccctactagtctcaatctccaacacatatggcctagactacgtacataacctaaacctactccaatgctaaaactaatcgtcccaacaattatattactaccactgacatgactttccaaaaaacacataatttgaatcaacacaaccacccacagcctaattattagcatcatccctctactattttttaaccaaatcaacaacaacctatttagctgttccccaaccttttcctccgaccccctaacaacccccctcctaatactaactacctgactcctacccctcacaatcatggcaagccaacgccacttatccagtgaaccactatcacgaaaaaaactctacctctctatactaatctccctacaaatctccttaattataacattcacagccacagaactaatcatattttatatcttcttcgaaaccacacttatccccaccttggctatcatcacccgatgaggcaaccagccagaacgcctgaacgcaggcacatacttcctattctacaccctagtaggctcccttcccctactcatcgcactaatttacactcacaacaccctaggctcactaaacattctactactcactctcactgcccaagaactatcaaactcctgagccaacaacttaatatgactagcttacacaatagcttttatagtaaagatacctctttacggactccacttatgactccctaaagcccatgtcgaagcccccatcgctgggtcaatagtacttgccgcagtactcttaaaactaggcggctatggtataatacgcctcacactcattctcaaccccctgacaaaacacatagcctaccccttccttgtactatccctatgaggcataattataacaagctccatctgcctacgacaaacagacctaaaatcgctcattgcatactcttcaatcagccacatagccctcgtagtaacagccattctcatccaaaccccctgaagcttcaccggcgcagtcattctcataatcgcccacgggcttacatcctcattactattctgcctagcaaactcaaactacgaacgcactcacagtcgcatcataatcctctctcaaggacttcaaactctactcccactaatagctttttgatgacttctagcaagcctcgctaacctcgccttaccccccactattaacctactgggagaactctctgtgctagtaaccacgttctcctgatcaaatatcactctcctacttacaggactcaacatactagtcacagccctatactccctctacatatttaccacaacacaatggggctcactcacccaccacattaacaacataaaaccctcattcacacgagaaaacaccctcatgttcatacacctatcccccattctcctcctatccctcaaccccgacatcattaccgggttttcctcttgtaaatatagtttaaccaaaacatcagattgtgaatctgacaacagaggcttacgaccccttatttaccgagaaagctcacaagaactgctaactcatgcccccatgtctaacaacatggctttctcaacttttaaaggataacagctatccattggtcttaggccccaaaaattttggtgcaactccaaataaaagtaataaccatgcacactactataaccaccctaaccctgacttccctaattccccccatccttaccaccctcgttaaccctaacaaaaaaaactcatacccccattatgtaaaatccattgtcgcatccacctttattatcagtctcttccccacaacaatattcatgtgcctagaccaagaagttattatctcgaactgacactgagccacaacccaaacaacccagctctccctaagcttcaaactagactacttctccataatattcatccctgtagcattgttcgttacatggtccatcatagaattctcactgtgatatataaactcagacccaaacattaatcagttcttcaaatatctactcatcttcctaattaccatactaatcttagttaccgctaacaacctattccaactgttcatcggctgagagggcgtaggaattatatccttcttgctcatcagttgatgatacgcccgagcagatgccaacacagcagccattcaagcaatcctatacaaccgtatcggcgatatcggtttcatcctcgccttagcatgatttatcctacactccaactcatgagacccacaacaaatagcccttctaaacgctaatccaagcctcaccccactactaggcctcctcctagcagcagcaggcaaatcagcccaattaggtctccacccctgactcccctcagccatagaaggccccaccccagtctcagccctactccactcaagcactatagttgtagcaggaatcttcttactcatccgcttccaccccctagcagaaaatagcccactaatccaaactctaacactatgcttaggcgctatcaccactctgttcgcagcagtctgcgcccttacacaaaatgacatcaaaaaaatcgtagccttctccacttcaagtcaactaggactcataatagttacaatcggcatcaaccaaccacacctagcattcctgcacatctgtacccacgccttcttcaaagccatactatttatgtgctccgggtccatcatccacaaccttaacaatgaacaagatattcgaaaaataggaggactactcaaaaccatacctctcacttcaacctccctcaccattggcagcctagcattagcaggaatacctttcctcacaggtttctactccaaagaccacatcatcgaaaccgcaaacatatcatacacaaacgcctgagccctatctattactctcatcgctacctccctgacaagcgcctatagcactcgaataattcttctcaccctaacaggtcaacctcgcttccccacccttactaacattaacgaaaataaccccaccctactaaaccccattaaacgcctggcagccggaagcctattcgcaggatttctcattactaacaacatttcccccgcatcccccttccaaacaacaatccccctctacctaaaactcacagccctcgctgtcactttcctaggacttctaacagccctagacctcaactacctaaccaacaaacttaaaataaaatccccactatgcacattttatttctccaacatactcggattctaccctagcatcacacaccgcacaatcccctatctaggccttcttacgagccaaaacctgcccctactcctcctagacctaacctgactagaaaagctattacctaaaacaatttcacagcaccaaatctccacctccatcatcacctcaacccaaaaaggcataattaaactttacttcctctctttcttcttcccactcatcctaaccctactcctaatcacataacctattcccccgagcaatctcaattacaatatatacaccaacaaacaatgttcaaccagtaactactactaatcaacgcccataatcatacaaagcccccgcaccaataggatcctcccgaatcaaccctgacccctctccttcataaattattcagcttcctacactattaaagtttaccacaaccaccaccccatcatactctttcacccacagcaccaatcctacctccatcgctaaccccactaaaacactcaccaagacctcaacccctgacccccatgcctcaggatactcctcaatagccatcgctgtagtatatccaaagacaaccatcattccccctaaataaattaaaaaaactattaaacccatataacctcccccaaaattcagaataataacacacccgaccacaccgctaacaatcaatactaaacccccataaataggagaaggcttagaagaaaaccccacaaaccccattactaaacccacactcaacagaaacaaagcatacatcattattctcgcacggactacaaccacgaccaatgatatgaaaaaccatcgttgtatttcaactacaagaacaccaatgaccccaatacgcaaaactaaccccctaataaaattaattaaccactcattcatcgacctccccaccccatccaacatctccgcatgatgaaacttcggctcactccttggcgcctgcctgatcctccaaatcaccacaggactattcctagccatgcactactcaccagacgcctcaaccgccttttcatcaatcgcccacatcactcgagacgtaaattatggctgaatcatccgctaccttcacgccaatggcgcctcaatattctttatctgcctcttcctacacatcgggcgaggcctatattacggatcatttctctactcagaaacctgaaacatcggcattatcctcctgcttgcaactatagcaacagccttcataggctatgtcctcccgtgaggccaaatatcattctgaggggccacagtaattacaaacttactatccgccatcccatacattgggacagacctagttcaatgaatctgaggaggctactcagtagacagtcccaccctcacacgattctttacctttcacttcatcttgcccttcattattgcagccctagcaacactccacctcctattcttgcacgaaacgggatcaaacaaccccctaggaatcacctcccattccgataaaatcaccttccacccttactacacaatcaaagacgccctcggcttacttctcttccttctctccttaatgacattaacactattctcaccagacctcctaggcgacccagacaattataccctagccaaccccttaaacacccctccccacatcaagcccgaatgatatttcctattcgcctacacaattctccgatccgtccctaacaaactaggaggcgtccttgccctattactatccatcctcatcctagcaataatccccatcctccatatatccaaacaacaaagcataatatttcgcccactaagccaatcactttattgactcctagccgcagacctcctcattctaacctgaatcggaggacaaccagtaagctacccttttaccatcattggacaagtagcatccgtactatacttcacaacaatcctaatcctaataccaactatctccctaattgaaaacaaaatactcaaatgggcctgtccttgtagtataaactaatacaccagtcttgtaaaccggagatgaaaacctttttccaaggacaaatcagagaaaaagtctttaactccaccattagcacccaaagctaagattctaatttaaactattctctgttctttcatggggaagcagatttgggtaccacccaagtattgactcacccatcaacaaccgctatgtatttcgtacattactgccagccaccatgaatattgtacggtaccataaatacttgaccacctgtagtacataaaaacccaatccacatcaaaaccccctccccatgcttacaagcaagtacagcaatcaaccctcaactatcacacatcaactgcaactccaaagccacccctcacccactaggataccaacaaacctacccacccttaacagtacatagtacataaagccatttaccgtacatagcacattacagtcaaatcccttctcgtccccatggatgacccccctcagataggggtcccttgaccaccatcctccgtgaaatcaatatcccgcacaagagtgctactctcctcgctccgggcccataacacttgggggtagctaaagtgaactgtatccgacatctggttcctacttcagggtcataaagcctaaatagcccacacgttccccttaaataagacatcacgatg

SEQ ID NO: 104 - DNA, 16567 bp, Homo sapiens mitochondrial DNA
  deletion (309)..(309): 309DEL C
gatcacaggtctatcaccctattaaccactcacgggagctctccatgcatttggtattttcgtctggggggtatgcacgcgatagcattgcgagacgctggagccggagcaccctatgtcgcagtatctgtctttgattcctgcctcatcctattatttatcgcacctacgttcaatattacaggcgaacatacttactaaagtgtgttaattaattaatgcttgtaggacataataataacaattgaatgtctgcacagccactttccacacagacatcataacaaaaaatttccaccaaacccccctcccccgcttctggccacagcacttaaacacatctctgccaaaccccaaaaacaaagaaccctaacaccagcctaaccagatttcaaattttatcttttggcggtatgcacttttaacagtcaccccccaactaacacattattttcccctcccactcccatactactaatctcatcaatacaacccccgcccatcctacccagcacacacacaccgctgctaaccccataccccgaaccaaccaaaccccaaagacaccccccacagtttatgtagcttacctcctcaaagcaatacactgaaaatgtttagacgggctcacatcaccccataaacaaataggtttggtcctagcctttctattagctcttagtaagattacacatgcaagcatccccgttccagtgagttcaccctctaaatcaccacgatcaaaaggaacaagcatcaagcacgcagcaatgcagctcaaaacgcttagcctagccacacccccacgggaaacagcagtgattaacctttagcaataaacgaaagtttaactaagctatactaaccccagggttggtcaatttcgtgccagccaccgcggtcacacgattaacccaagtcaatagaagccggcgtaaagagtgttttagatcaccccctccccaataaagctaaaactcacctgagttgtaaaaaactccagttgacacaaaatagactacgaaagtggctttaacatatctgaacacacaatagctaagacccaaactgggattagataccccactatgcttagccctaaacctcaacagttaaatcaacaaaactgctcgccagaacactacgagccacagcttaaaactcaaaggacctggcggtgcttcatatccctctagaggagcctgttctgtaatcgataaaccccgatcaacctcaccacctcttgctcagcctatataccgccatcttcagcaaaccctgatgaaggctacaaagtaagcgcaagtacccacgtaaagacgttaggtcaaggtgtagcccatgaggtggcaagaaatgggctacattttctaccccagaaaactacgatagcccttatgaaacttaagggtcgaaggtggatttagcagtaaactaagagtagagtgcttagttgaacagggccctgaagcgcgtacacaccgcccgtcaccctcctcaagtatacttcaaaggacatttaactaaaacccctacgcatttatatagaggagacaagtcgtaacatggtaagtgtactggaaagtgcacttggacgaaccagagtgtagcttaacacaaagcacccaacttacacttaggagatttcaacttaacttgaccgctctgagctaaacctagccccaaacccactccaccttactaccagacaaccttagccaaaccatttacccaaataaagtataggcgatagaaattgaaacctggcgcaatagatatagtaccgcaagggaaagatgaaaaattataaccaagcataatatagcaaggactaacccctataccttctgcataatgaattaactagaaataactttgcaaggagagccaaagctaagacccccgaaaccagacgagctacctaagaacagctaaaagagcacacccgtctatgtagcaaaatagtgggaagatttataggtagaggcgacaaacctaccgagcctggtgatagctggttgtccaagatagaatcttagttcaactttaaatttgcccacagaaccctctaaatccccttgtaaatttaactgttagtccaaagaggaacagctctttggacactaggaaaaaaccttgtagagagagtaaaaaatttaacacccatagtaggcctaaaagcagccaccaattaagaaagcgttcaagctcaacacccactacctaaaaaatcccaaacatataactgaactcctcacacccaattggaccaatctatcaccctatagaagaactaatgttagtataagtaacatgaaaacattctcctccgcataagcctgcgtcagattaaaacactgaactgacaattaacagcccaatatctacaatcaaccaacaagtcattattaccctcactgtcaacccaacacaggcatgctcataaggaaaggttaaaaaaagtaaaaggaactcggcaaatcttaccccgcctgtttaccaaaaacatcacctctagcatcaccagtattagaggcaccgcctgcccagtgacacatgtttaacggccgcggtaccctaaccgtgcaaaggtagcataatcacttgttccttaaatagggacctgtatgaatggctccacgagggttcagctgtctcttacttttaaccagtgaaattgacctgcccgtgaagaggcgggcataacacagcaagacgagaagaccctatggagctttaatttattaatgcaaacagtacctaacaaacccacaggtcctaaactaccaaacctgcattaaaaatttcggttggggcgacctcggagcagaacccaacctccgagcagtacatgctaagacttcaccagtcaaagcgaactactatactcaattgatccaataacttgaccaacggaacaagttaccctagggataacagcgcaatcctattctagagtccatatcaacaatagggtttacgacctcgatgttggatcaggacatcccgatggtgcagccgctattaaaggttcgtttgttcaacgattaaagtcctacgtgatctgagttcagaccggagtaatccaggtcggtttctatctacttcaaattcctccctgtacgaaaggacaagagaaataaggcctacttcacaaagcgccttcccccgtaaatgatatcatctcaacttagtattatacccacacccacccaagaacagggtttgttaagatggcagagcccggtaatcgcataaaacttaaaactttacagtcagaggttcaattcctcttcttaacaacatacccatggccaacctcctactcctcattgtacccattctaatcgcaatggcattcctaatgcttaccgaacgaaaaattctaggctatatacaactacgcaaaggccccaacgttgtaggcccctacgggctactacaacccttcgctgacgccataaaactcttcaccaaagagcccctaaaacccgccacatctaccatcaccctctacatcaccgccccgaccttagctctcaccatcgctcttctactatgaacccccctccccatacccaaccccctggtcaacctcaacctaggcctcctatttattctagccacctctagcctagccgtttactcaatcctctgatcagggtgagcatcaaactcaaactacgccctgatcggcgcactgcgagcagtagcccaaacaatctcatatgaagtcaccctagccatcattctactatcaacattactaataagtggctcctttaacctctccacccttatcacaacacaagaacacctctgattactcctgccatcatgacccttggccataatatgatttatctccacactagcagagaccaaccgaacccccttcgaccttgccgaaggggagtccgaactagtctcaggcttcaacatcgaatacgccgcaggccccttcgccctattcttcatagccgaatacacaaacattattataataaacaccctcaccactacaatcttcctaggaacaacatatgacgcactctcccctgaactctacacaacatattttgtcaccaagaccctacttctaacctccctgttcttatgaattcgaacagcatacccccgattccgctacgaccaactcatacacctcctatgaaaaaacttcctaccactcaccctagcattacttatatgatatgtctccatacccattacaatctccagcattccccctcaaacctaagaaatatgtctgataaaagagttactttgatagagtaaataataggagcttaaacccccttatttctaggactatgagaatcgaacccatccctgagaatccaaaattctccgtgccacctatcacaccccatcctaaagtaaggtcagctaaataagctatcgggcccataccccgaaaatgttggttatacccttcccgtactaattaatcccctggcccaacccgtcatctactctaccatctttgcaggcacactcatcacagcgctaagctcgcactgattttttacctgagtaggcctagaaataaacatgctagcttttattccagttctaaccaaaaaaataaaccctcgttccacagaagctgccatcaagtatttcctcacgcaagcaaccgcatccataatccttctaatagctatcctcttcaacaatatactctccggacaatgaaccataaccaatactaccaatcaatactcatcattaataatcataatagctatagcaataaaactaggaatagccccctttcacttctgagtcccagaggttacccaaggcacccctctgacatccggcctgcttcttctcacatgacaaaaactagcccccatctcaatcatataccaaatctctccctcactaaacgtaagccttctcctcactctctcaatcttatccatcatagcaggcagttgaggtggattaaaccaaacccagctacgcaaaatcttagcatactcctcaattacccacataggatgaataatagcagttctaccgtacaaccctaacataaccattcttaatttaactatttatattatcctaactactaccgcattcctactactcaacttaaactccagcaccacgaccctactactatctcgcacctgaaacaagctaacatgactaacacccttaattccatccaccctcctctccctaggaggcctgcccccgctaaccggctttttgcccaaatgggccattatcgaagaattcacaaaaaacaatagcctcatcatccccaccatcatagccaccatcaccctccttaacctctacttctacctacgcctaatctactccacctcaatcacactactccccatatctaacaacgtaaaaataaaatgacagtttgaacatacaaaacccaccccattcctccccacactcatcgcccttaccacgctactcctacctatctccccttttatactaataatcttatagaaatttaggttaaatacagaccaagagccttcaaagccctcagtaagttgcaatacttaatttctgtaacagctaaggactgcaaaaccccactctgcatcaactgaacgcaaatcagccactttaattaagctaagcccttactagaccaatgggacttaaacccacaaacacttagttaacagctaagcaccctaatcaactggcttcaatctacttctcccgccgccgggaaaaaaggcgggagaagccccggcaggtttgaagctgcttcttcgaatttgcaattcaatatgaaaatcacctcggagctggtaaaaagaggcctaacccctgtctttagatttacagtccaatgcttcactcagccattttacctcacccccactgatgttcgccgaccgttgactattctctacaaaccacaaagacattggaacactatacctattattcggcgcatgagctggagtcctaggcacagctctaagcctccttattcgagccgagctgggccagccaggcaaccttctaggtaacgaccacatctacaacgttatcgtcacagcccatgcatttgtaataatcttcttcatagtaatacccatcataatcggaggctttggcaactgactagttcccctaataatcggtgcccccgatatggcgtttccccgcataaacaacataagcttctgactcttacctccctctctcctactcctgctcgcatctgctatagtggaggccggagcaggaacaggttgaacagtctaccctcccttagcagggaactactcccaccctggagcctccgtagacctaaccatcttctccttacacctagcaggtgtctcctctatcttaggggccatcaatttcatcacaacaattatcaatataaaaccccctgccataacccaataccaaacgcccctcttcgtctgatccgtcctaatcacagcagtcctacttctcctatctctcccagtcctagctgctggcatcactatactactaacagaccgcaacctcaacaccaccttcttcgaccccgccggaggaggagaccccattctataccaacacctattctgatttttcggtcaccctgaagtttatattcttatcctaccaggcttcggaataatctcccatattgtaacttactactccggaaaaaaagaaccatttggatacataggtatggtctgagctatgatatcaattggcttcctagggtttatcgtgtgagcacaccatatatttacagtaggaatagacgtagacacacgagcatatttcacctccgctaccataatcatcgctatccccaccggcgtcaaagtatttagctgactcgccacactccacggaagcaatatgaaatgatctgctgcagtgctctgagccctaggattcatctttcttttcaccgtaggtggcctgactggcattgtattagcaaactcatcactagacatcgtactacacgacacgtactacgttgtagcccacttccactatgtcctatcaataggagctgtatttgccatcataggaggcttcattcactgatttcccctattctcaggctacaccctagaccaaacctacgccaaaatccatttcactatcatattcatcggcgtaaatctaactttcttcccacaacactttctcggcctatccggaatgccccgacgttactcggactaccccgatgcatacaccacatgaaacatcctatcatctgtaggctcattcatttctctaacagcagtaatattaataattttcatgatttgagaagccttcgcttcgaagcgaaaagtcctaatagtagaagaaccctccataaacctggagtgactatatggatgccccccaccctaccacacattcgaagaacccgtatacataaaatctagacaaaaaaggaaggaatcgaaccccccaaagctggtttcaagccaaccccatggcctccatgactttttcaaaaaggtattagaaaaaccatttcataactttgtcaaagttaaattataggctaaatcctatatatcttaatggcacatgcagcgcaagtaggtctacaagacgctacttcccctatcatagaagagcttatcacctttcatgatcacgccctcataatcattttccttatctgcttcctagtcctgtatgcccttttcctaacactcacaacaaaactaactaatactaacatctcagacgctcaggaaatagaaaccgtctgaactatcctgcccgccatcatcctagtcctcatcgccctcccatccctacgcatcctttacataacagacgaggtcaacgatccctcccttaccatcaaatcaattggccaccaatggtactgaacctacgagtacaccgactacggcggactaatcttcaactcctacatacttcccccattattcctagaaccaggcgacctgcgactccttgacgttgacaatcgagtagtactcccgattgaagcccccattcgtataataattacatcacaagacgtcttgcactcatgagctgtccccacattaggcttaaaaacagatgcaattcccggacgtctaaaccaaaccactttcaccgctacacgaccgggggtatactacggtcaatgctctgaaatctgtggagcaaaccacagtttcatgcccatcgtcctagaattaattcccctaaaaatctttgaaatagggcccgtatttaccctatagcaccccctctaccccctctagagcccactgtaaagctaacttagcattaaccttttaagttaaagattaagagaaccaacacctctttacagtgaaatgccccaactaaatactaccgtatggcccaccataattacccccatactccttacactattcctcatcacccaactaaaaatattaaacacaaactaccacctacctccctcaccaaagcccataaaaataaaaaattataacaaaccctgagaaccaaaatgaacgaaaatctgttcgcttcattcattgcccccacaatcctaggcctacccgccgcagtactgatcattctatttccccctctattgatccccacctccaaatatctcatcaacaaccgactaatcaccacccaacaatgactaatcaaactaacctcaaaacaaatgataaccatacacaacactaaaggacgaacctgatctcttatactagtatccttaatcatttttattgccacaactaacctcctcggactcctgcctcactcatttacaccaaccacccaactatctataaacctagccatggccatccccttatgagcgggcacagtgattataggctttcgctctaagattaaaaatgccctagcccacttcttaccacaaggcacacctacaccccttatccccatactagttattatcgaaaccatcagcctactcattcaaccaatagccctggccgtacgcctaaccgctaacattactgcaggccacctactcatgcacctaattggaagcgccaccctagcaatatcaaccattaaccttccctctacacttatcatcttcacaattctaattctactgactatcctagaaatcgctgtcgccttaatccaagcctacgttttcacacttctagtaagcctctacctgcacgacaacacataatgacccaccaatcacatgcctatcatatagtaaaacccagcccatgacccctaacaggggccctctcagccctcctaatgacctccggcctagccatgtgatttcacttccactccataacgctcctcatactaggcctactaaccaacacactaaccatataccaatgatggcgcgatgtaacacgagaaagcacataccaaggccaccacacaccacctgtccaaaaaggccttcgatacgggataatcctatttattacctcagaagtttttttcttcgcaggatttttctgagccttttaccactccagcctagcccctaccccccaattaggagggcactggcccccaacaggcatcaccccgctaaatcccctagaagtcccactcctaaacacatccgtattactcgcatcaggagtatcaatcacctgagctcaccatagtctaatagaaaacaaccgaaaccaaataattcaagcactgcttattacaattttactgggtctctattttaccctcctacaagcctcagagtacttcgagtctcccttcaccatttccgacggcatctacggctcaacattttttgtagccacaggcttccacggacttcacgtcattattggctcaactttcctcactatctgcttcatccgccaactaatatttcactttacatccaaacatcactttggcttcgaagccgccgcctgatactggcattttgtagatgtggtttgactatttctgtatgtctccatctattgatgagggtcttactcttttagtataaatagtaccgttaacttccaattaactagttttgacaacattcaaaaaagagtaataaacttcgccttaattttaataatcaacaccctcctagccttactactaataattattacattttgactaccacaactcaacggctacatagaaaaatccaccccttacgagtgcggcttcgaccctatatcccccgcccgcgtccctttctccataaaattcttcttagtagctattaccttcttattatttgatctagaaattgccctccttttacccctaccatgagccctacaaacaactaacctgccactaatagttatgtcatccctcttattaatcatcatcctagccctaagtctggcctatgagtgactacaaaaaggattagactgaaccgaattggtatatagtttaaacaaaacgaatgatttcgactcattaaattatgataatcatatttaccaaatgcccctcatttacataaatattatactagcatttaccatctcacttctaggaatactagtatatcgctcacacctcatatcctccctactatgcctagaaggaataatactatcgctgttcattatagctactctcataaccctcaacacccactccctcttagccaatattgtgcctattgccatactagtctttgccgcctgcgaagcagcggtgggcctagccctactagtctcaatctccaacacatatggcctagactacgtacataacctaaacctactccaatgctaaaactaatcgtcccaacaattatattactaccactgacatgactttccaaaaaacacataatttgaatcaacacaaccacccacagcctaattattagcatcatccctctactattttttaaccaaatcaacaacaacctatttagctgttccccaaccttttcctccgaccccctaacaacccccctcctaatactaactacctgactcctacccctcacaatcatggcaagccaacgccacttatccagtgaaccactatcacgaaaaaaactctacctctctatactaatctccctacaaatctccttaattataacattcacagccacagaactaatcatattttatatcttcttcgaaaccacacttatccccaccttggctatcatcacccgatgaggcaaccagccagaacgcctgaacgcaggcacatacttcctattctacaccctagtaggctcccttcccctactcatcgcactaatttacactcacaacaccctaggctcactaaacattctactactcactctcactgcccaagaactatcaaactcctgagccaacaacttaatatgactagcttacacaatagcttttatagtaaagatacctctttacggactccacttatgactccctaaagcccatgtcgaagcccccatcgctgggtcaatagtacttgccgcagtactcttaaaactaggcggctatggtataatacgcctcacactcattctcaaccccctgacaaaacacatagcctaccccttccttgtactatccctatgaggcataattataacaagctccatctgcctacgacaaacagacctaaaatcgctcattgcatactcttcaatcagccacatagccctcgtagtaacagccattctcatccaaaccccctgaagcttcaccggcgcagtcattctcataatcgcccacgggcttacatcctcattactattctgcctagcaaactcaaactacgaacgcactcacagtcgcatcataatcctctctcaaggacttcaaactctactcccactaatagctttttgatgacttctagcaagcctcgctaacctcgccttaccccccactattaacctactgggagaactctctgtgctagtaaccacgttctcctgatcaaatatcactctcctacttacaggactcaacatactagtcacagccctatactccctctacatatttaccacaacacaatggggctcactcacccaccacattaacaacataaaaccctcattcacacgagaaaacaccctcatgttcatacacctatcccccattctcctcctatccctcaaccccgacatcattaccgggttttcctcttgtaaatatagtttaaccaaaacatcagattgtgaatctgacaacagaggcttacgaccccttatttaccgagaaagctcacaagaactgctaactcatgcccccatgtctaacaacatggctttctcaacttttaaaggataacagctatccattggtcttaggccccaaaaattttggtgcaactccaaataaaagtaataaccatgcacactactataaccaccctaaccctgacttccctaattccccccatccttaccaccctcgttaaccctaacaaaaaaaactcatacccccattatgtaaaatccattgtcgcatccacctttattatcagtctcttccccacaacaatattcatgtgcctagaccaagaagttattatctcgaactgacactgagccacaacccaaacaacccagctctccctaagcttcaaactagactacttctccataatattcatccctgtagcattgttcgttacatggtccatcatagaattctcactgtgatatataaactcagacccaaacattaatcagttcttcaaatatctactcatcttcctaattaccatactaatcttagttaccgctaacaacctattccaactgttcatcggctgagagggcgtaggaattatatccttcttgctcatcagttgatgatacgcccgagcagatgccaacacagcagccattcaagcaatcctatacaaccgtatcggcgatatcggtttcatcctcgccttagcatgatttatcctacactccaactcatgagacccacaacaaatagcccttctaaacgctaatccaagcctcaccccactactaggcctcctcctagcagcagcaggcaaatcagcccaattaggtctccacccctgactcccctcagccatagaaggccccaccccagtctcagccctactccactcaagcactatagttgtagcaggaatcttcttactcatccgcttccaccccctagcagaaaatagcccactaatccaaactctaacactatgcttaggcgctatcaccactctgttcgcagcagtctgcgcccttacacaaaatgacatcaaaaaaatcgtagccttctccacttcaagtcaactaggactcataatagttacaatcggcatcaaccaaccacacctagcattcctgcacatctgtacccacgccttcttcaaagccatactatttatgtgctccgggtccatcatccacaaccttaacaatgaacaagatattcgaaaaataggaggactactcaaaaccatacctctcacttcaacctccctcaccattggcagcctagcattagcaggaatacctttcctcacaggtttctactccaaagaccacatcatcgaaaccgcaaacatatcatacacaaacgcctgagccctatctattactctcatcgctacctccctgacaagcgcctatagcactcgaataattcttctcaccctaacaggtcaacctcgcttccccacccttactaacattaacgaaaataaccccaccctactaaaccccattaaacgcctggcagccggaagcctattcgcaggatttctcattactaacaacatttcccccgcatcccccttccaaacaacaatccccctctacctaaaactcacagccctcgctgtcactttcctaggacttctaacagccctagacctcaactacctaaccaacaaacttaaaataaaatccccactatgcacattttatttctccaacatactcggattctaccctagcatcacacaccgcacaatcccctatctaggccttcttacgagccaaaacctgcccctactcctcctagacctaacctgactagaaaagctattacctaaaacaatttcacagcaccaaatctccacctccatcatcacctcaacccaaaaaggcataattaaactttacttcctctctttcttcttcccactcatcctaaccctactcctaatcacataacctattcccccgagcaatctcaattacaatatatacaccaacaaacaatgttcaaccagtaactactactaatcaacgcccataatcatacaaagcccccgcaccaataggatcctcccgaatcaaccctgacccctctccttcataaattattcagcttcctacactattaaagtttaccacaaccaccaccccatcatactctttcacccacagcaccaatcctacctccatcgctaaccccactaaaacactcaccaagacctcaacccctgacccccatgcctcaggatactcctcaatagccatcgctgtagtatatccaaagacaaccatcattccccctaaataaattaaaaaaactattaaacccatataacctcccccaaaattcagaataataacacacccgaccacaccgctaacaatcaatactaaacccccataaataggagaaggcttagaagaaaaccccacaaaccccattactaaacccacactcaacagaaacaaagcatacatcattattctcgcacggactacaaccacgaccaatgatatgaaaaaccatcgttgtatttcaactacaagaacaccaatgaccccaatacgcaaaactaaccccctaataaaattaattaaccactcattcatcgacctccccaccccatccaacatctccgcatgatgaaacttcggctcactccttggcgcctgcctgatcctccaaatcaccacaggactattcctagccatgcactactcaccagacgcctcaaccgccttttcatcaatcgcccacatcactcgagacgtaaattatggctgaatcatccgctaccttcacgccaatggcgcctcaatattctttatctgcctcttcctacacatcgggcgaggcctatattacggatcatttctctactcagaaacctgaaacatcggcattatcctcctgcttgcaactatagcaacagccttcataggctatgtcctcccgtgaggccaaatatcattctgaggggccacagtaattacaaacttactatccgccatcccatacattgggacagacctagttcaatgaatctgaggaggctactcagtagacagtcccaccctcacacgattctttacctttcacttcatcttgcccttcattattgcagccctagcaacactccacctcctattcttgcacgaaacgggatcaaacaaccccctaggaatcacctcccattccgataaaatcaccttccacccttactacacaatcaaagacgccctcggcttacttctcttccttctctccttaatgacattaacactattctcaccagacctcctaggcgacccagacaattataccctagccaaccccttaaacacccctccccacatcaagcccgaatgatatttcctattcgcctacacaattctccgatccgtccctaacaaactaggaggcgtccttgccctattactatccatcctcatcctagcaataatccccatcctccatatatccaaacaacaaagcataatatttcgcccactaagccaatcactttattgactcctagccgcagacctcctcattctaacctgaatcggaggacaaccagtaagctacccttttaccatcattggacaagtagcatccgtactatacttcacaacaatcctaatcctaataccaactatctccctaattgaaaacaaaatactcaaatgggcctgtccttgtagtataaactaatacaccagtcttgtaaaccggagatgaaaacctttttccaaggacaaatcagagaaaaagtctttaactccaccattagcacccaaagctaagattctaatttaaactattctctgttctttcatggggaagcagatttgggtaccacccaagtattgactcacccatcaacaaccgctatgtatttcgtacattactgccagccaccatgaatattgtacggtaccataaatacttgaccacctgtagtacataaaaacccaatccacatcaaaaccccctccccatgcttacaagcaagtacagcaatcaaccctcaactatcacacatcaactgcaactccaaagccacccctcacccactaggataccaacaaacctacccacccttaacagtacatagtacataaagccatttaccgtacatagcacattacagtcaaatcccttctcgtccccatggatgacccccctcagataggggtcccttgaccaccatcctccgtgaaatcaatatcccgcacaagagtgctactctcctcgctccgggcccataacacttgggggtagctaaagtgaactgtatccgacatctggttcctacttcagggtcataaagcctaaatagcccacacgttccccttaaataagacatcacgatg

SEQ ID NO: 105 - DNA, 16567 bp, Homo sapiens mitochondrial DNA
  deletion (310)..(310): 310DEL C/T
gatcacaggtctatcaccctattaaccactcacgggagctctccatgcatttggtattttcgtctggggggtatgcacgcgatagcattgcgagacgctggagccggagcaccctatgtcgcagtatctgtctttgattcctgcctcatcctattatttatcgcacctacgttcaatattacaggcgaacatacttactaaagtgtgttaattaattaatgcttgtaggacataataataacaattgaatgtctgcacagccactttccacacagacatcataacaaaaaatttccaccaaaccccccccccccgcttctggccacagcacttaaacacatctctgccaaaccccaaaaacaaagaaccctaacaccagcctaaccagatttcaaattttatcttttggcggtatgcacttttaacagtcaccccccaactaacacattattttcccctcccactcccatactactaatctcatcaatacaacccccgcccatcctacccagcacacacacaccgctgctaaccccataccccgaaccaaccaaaccccaaagacaccccccacagtttatgtagcttacctcctcaaagcaatacactgaaaatgtttagacgggctcacatcaccccataaacaaataggtttggtcctagcctttctattagctcttagtaagattacacatgcaagcatccccgttccagtgagttcaccctctaaatcaccacgatcaaaaggaacaagcatcaagcacgcagcaatgcagctcaaaacgcttagcctagccacacccccacgggaaacagcagtgattaacctttagcaataaacgaaagtttaactaagctatactaaccccagggttggtcaatttcgtgccagccaccgcggtcacacgattaacccaagtcaatagaagccggcgtaaagagtgttttagatcaccccctccccaataaagctaaaactcacctgagttgtaaaaaactccagttgacacaaaatagactacgaaagtggctttaacatatctgaacacacaatagctaagacccaaactgggattagataccccactatgcttagccctaaacctcaacagttaaatcaacaaaactgctcgccagaacactacgagccacagcttaaaactcaaaggacctggcggtgcttcatatccctctagaggagcctgttctgtaatcgataaaccccgatcaacctcaccacctcttgctcagcctatataccgccatcttcagcaaaccctgatgaaggctacaaagtaagcgcaagtacccacgtaaagacgttaggtcaaggtgtagcccatgaggtggcaagaaatgggctacattttctaccccagaaaactacgatagcccttatgaaacttaagggtcgaaggtggatttagcagtaaactaagagtagagtgcttagttgaacagggccctgaagcgcgtacacaccgcccgtcaccctcctcaagtatacttcaaaggacatttaactaaaacccctacgcatttatatagaggagacaagtcgtaacatggtaagtgtactggaaagtgcacttggacgaaccagagtgtagcttaacacaaagcacccaacttacacttaggagatttcaacttaacttgaccgctctgagctaaacctagccccaaacccactccaccttactaccagacaaccttagccaaaccatttacccaaataaagtataggcgatagaaattgaaacctggcgcaatagatatagtaccgcaagggaaagatgaaaaattataaccaagcataatatagcaaggactaacccctataccttctgcataatgaattaactagaaataactttgcaaggagagccaaagctaagacccccgaaaccagacgagctacctaagaacagctaaaagagcacacccgtctatgtagcaaaatagtgggaagatttataggtagaggcgacaaacctaccgagcctggtgatagctggttgtccaagatagaatcttagttcaactttaaatttgcccacagaaccctctaaatccccttgtaaatttaactgttagtccaaagaggaacagctctttggacactaggaaaaaaccttgtagagagagtaaaaaatttaacacccatagtaggcctaaaagcagccaccaattaagaaagcgttcaagctcaacacccactacctaaaaaatcccaaacatataactgaactcctcacacccaattggaccaatctatcaccctatagaagaactaatgttagtataagtaacatgaaaacattctcctccgcataagcctgcgtcagattaaaacactgaactgacaattaacagcccaatatctacaatcaaccaacaagtcattattaccctcactgtcaacccaacacaggcatgctcataaggaaaggttaaaaaaagtaaaaggaactcggcaaatcttaccccgcctgtttaccaaaaacatcacctctagcatcaccagtattagaggcaccgcctgcccagtgacacatgtttaacggccgcggtaccctaaccgtgcaaaggtagcataatcacttgttccttaaatagggacctgtatgaatggctccacgagggttcagctgtctcttacttttaaccagtgaaattgacctgcccgtgaagaggcgggcataacacagcaagacgagaagaccctatggagctttaatttattaatgcaaacagtacctaacaaacccacaggtcctaaactaccaaacctgcattaaaaatttcggttggggcgacctcggagcagaacccaacctccgagcagtacatgctaagacttcaccagtcaaagcgaactactatactcaattgatccaataacttgaccaacggaacaagttaccctagggataacagcgcaatcctattctagagtccatatcaacaatagggtttacgacctcgatgttggatcaggacatcccgatggtgcagccgctattaaaggttcgtttgttcaacgattaaagtcctacgtgatctgagttcagaccggagtaatccaggtcggtttctatctacttcaaattcctccctgtacgaaaggacaagagaaataaggcctacttcacaaagcgccttcccccgtaaatgatatcatctcaacttagtattatacccacacccacccaagaacagggtttgttaagatggcagagcccggtaatcgcataaaacttaaaactttacagtcagaggttcaattcctcttcttaacaacatacccatggccaacctcctactcctcattgtacccattctaatcgcaatggcattcctaatgcttaccgaacgaaaaattctaggctatatacaactacgcaaaggccccaacgttgtaggcccctacgggctactacaacccttcgctgacgccataaaactcttcaccaaagagcccctaaaacccgccacatctaccatcaccctctacatcaccgccccgaccttagctctcaccatcgctcttctactatgaacccccctccccatacccaaccccctggtcaacctcaacctaggcctcctatttattctagccacctctagcctagccgtttactcaatcctctgatcagggtgagcatcaaactcaaactacgccctgatcggcgcactgcgagcagtagcccaaacaatctcatatgaagtcaccctagccatcattctactatcaacattactaataagtggctcctttaacctctccacccttatcacaacacaagaacacctctgattactcctgccatcatgacccttggccataatatgatttatctccacactagcagagaccaaccgaacccccttcgaccttgccgaaggggagtccgaactagtctcaggcttcaacatcgaatacgccgcaggccccttcgccctattcttcatagccgaatacacaaacattattataataaacaccctcaccactacaatcttcctaggaacaacatatgacgcactctcccctgaactctacacaacatattttgtcaccaagaccctacttctaacctccctgttcttatgaattcgaacagcatacccccgattccgctacgaccaactcatacacctcctatgaaaaaacttcctaccactcaccctagcattacttatatgatatgtctccatacccattacaatctccagcattccccctcaaacctaagaaatatgtctgataaaagagttactttgatagagtaaataataggagcttaaacccccttatttctaggactatgagaatcgaacccatccctgagaatccaaaattctccgtgccacctatcacaccccatcctaaagtaaggtcagctaaataagctatcgggcccataccccgaaaatgttggttatacccttcccgtactaattaatcccctggcccaacccgtcatctactctaccatctttgcaggcacactcatcacagcgctaagctcgcactgattttttacctgagtaggcctagaaataaacatgctagcttttattccagttctaaccaaaaaaataaaccctcgttccacagaagctgccatcaagtatttcctcacgcaagcaaccgcatccataatccttctaatagctatcctcttcaacaatatactctccggacaatgaaccataaccaatactaccaatcaatactcatcattaataatcataatagctatagcaataaaactaggaatagccccctttcacttctgagtcccagaggttacccaaggcacccctctgacatccggcctgcttcttctcacatgacaaaaactagcccccatctcaatcatataccaaatctctccctcactaaacgtaagccttctcctcactctctcaatcttatccatcatagcaggcagttgaggtggattaaaccaaacccagctacgcaaaatcttagcatactcctcaattacccacataggatgaataatagcagttctaccgtacaaccctaacataaccattcttaatttaactatttatattatcctaactactaccgcattcctactactcaacttaaactccagcaccacgaccctactactatctcgcacctgaaacaagctaacatgactaacacccttaattccatccaccctcctctccctaggaggcctgcccccgctaaccggctttttgcccaaatgggccattatcgaagaattcacaaaaaacaatagcctcatcatccccaccatcatagccaccatcaccctccttaacctctacttctacctacgcctaatctactccacctcaatcacactactccccatatctaacaacgtaaaaataaaatgacagtttgaacatacaaaacccaccccattcctccccacactcatcgcccttaccacgctactcctacctatctccccttttatactaataatcttatagaaatttaggttaaatacagaccaagagccttcaaagccctcagtaagttgcaatacttaatttctgtaacagctaaggactgcaaaaccccactctgcatcaactgaacgcaaatcagccactttaattaagctaagcccttactagaccaatgggacttaaacccacaaacacttagttaacagctaagcaccctaatcaactggcttcaatctacttctcccgccgccgggaaaaaaggcgggagaagccccggcaggtttgaagctgcttcttcgaatttgcaattcaatatgaaaatcacctcggagctggtaaaaagaggcctaacccctgtctttagatttacagtccaatgcttcactcagccattttacctcacccccactgatgttcgccgaccgttgactattctctacaaaccacaaagacattggaacactatacctattattcggcgcatgagctggagtcctaggcacagctctaagcctccttattcgagccgagctgggccagccaggcaaccttctaggtaacgaccacatctacaacgttatcgtcacagcccatgcatttgtaataatcttcttcatagtaatacccatcataatcggaggctttggcaactgactagttcccctaataatcggtgcccccgatatggcgtttccccgcataaacaacataagcttctgactcttacctccctctctcctactcctgctcgcatctgctatagtggaggccggagcaggaacaggttgaacagtctaccctcccttagcagggaactactcccaccctggagcctccgtagacctaaccatcttctccttacacctagcaggtgtctcctctatcttaggggccatcaatttcatcacaacaattatcaatataaaaccccctgccataacccaataccaaacgcccctcttcgtctgatccgtcctaatcacagcagtcctacttctcctatctctcccagtcctagctgctggcatcactatactactaacagaccgcaacctcaacaccaccttcttcgaccccgccggaggaggagaccccattctataccaacacctattctgatttttcggtcaccctgaagtttatattcttatcctaccaggcttcggaataatctcccatattgtaacttactactccggaaaaaaagaaccatttggatacataggtatggtctgagctatgatatcaattggcttcctagggtttatcgtgtgagcacaccatatatttacagtaggaatagacgtagacacacgagcatatttcacctccgctaccataatcatcgctatccccaccggcgtcaaagtatttagctgactcgccacactccacggaagcaatatgaaatgatctgctgcagtgctctgagccctaggattcatctttcttttcaccgtaggtggcctgactggcattgtattagcaaactcatcactagacatcgtactacacgacacgtactacgttgtagcccacttccactatgtcctatcaataggagctgtatttgccatcataggaggcttcattcactgatttcccctattctcaggctacaccctagaccaaacctacgccaaaatccatttcactatcatattcatcggcgtaaatctaactttcttcccacaacactttctcggcctatccggaatgccccgacgttactcggactaccccgatgcatacaccacatgaaacatcctatcatctgtaggctcattcatttctctaacagcagtaatattaataattttcatgatttgagaagccttcgcttcgaagcgaaaagtcctaatagtagaagaaccctccataaacctggagtgactatatggatgccccccaccctaccacacattcgaagaacccgtatacataaaatctagacaaaaaaggaaggaatcgaaccccccaaagctggtttcaagccaaccccatggcctccatgactttttcaaaaaggtattagaaaaaccatttcataactttgtcaaagttaaattataggctaaatcctatatatcttaatggcacatgcagcgcaagtaggtctacaagacgctacttcccctatcatagaagagcttatcacctttcatgatcacgccctcataatcattttccttatctgcttcctagtcctgtatgcccttttcctaacactcacaacaaaactaactaatactaacatctcagacgctcaggaaatagaaaccgtctgaactatcctgcccgccatcatcctagtcctcatcgccctcccatccctacgcatcctttacataacagacgaggtcaacgatccctcccttaccatcaaatcaattggccaccaatggtactgaacctacgagtacaccgactacggcggactaatcttcaactcctacatacttcccccattattcctagaaccaggcgacctgcgactccttgacgttgacaatcgagtagtactcccgattgaagcccccattcgtataataattacatcacaagacgtcttgcactcatgagctgtccccacattaggcttaaaaacagatgcaattcccggacgtctaaaccaaaccactttcaccgctacacgaccgggggtatactacggtcaatgctctgaaatctgtggagcaaaccacagtttcatgcccatcgtcctagaattaattcccctaaaaatctttgaaatagggcccgtatttaccctatagcaccccctctaccccctctagagcccactgtaaagctaacttagcattaaccttttaagttaaagattaagagaaccaacacctctttacagtgaaatgccccaactaaatactaccgtatggcccaccataattacccccatactccttacactattcctcatcacccaactaaaaatattaaacacaaactaccacctacctccctcaccaaagcccataaaaataaaaaattataacaaaccctgagaaccaaaatgaacgaaaatctgttcgcttcattcattgcccccacaatcctaggcctacccgccgcagtactgatcattctatttccccctctattgatccccacctccaaatatctcatcaacaaccgactaatcaccacccaacaatgactaatcaaactaacctcaaaacaaatgataaccatacacaacactaaaggacgaacctgatctcttatactagtatccttaatcatttttattgccacaactaacctcctcggactcctgcctcactcatttacaccaaccacccaactatctataaacctagccatggccatccccttatgagcgggcacagtgattataggctttcgctctaagattaaaaatgccctagcccacttcttaccacaaggcacacctacaccccttatccccatactagttattatcgaaaccatcagcctactcattcaaccaatagccctggccgtacgcctaaccgctaacattactgcaggccacctactcatgcacctaattggaagcgccaccctagcaatatcaaccattaaccttccctctacacttatcatcttcacaattctaattctactgactatcctagaaatcgctgtcgccttaatccaagcctacgttttcacacttctagtaagcctctacctgcacgacaacacataatgacccaccaatcacatgcctatcatatagtaaaacccagcccatgacccctaacaggggccctctcagccctcctaatgacctccggcctagccatgtgatttcacttccactccataacgctcctcatactaggcctactaaccaacacactaaccatataccaatgatggcgcgatgtaacacgagaaagcacataccaaggccaccacacaccacctgtccaaaaaggccttcgatacgggataatcctatttattacctcagaagtttttttcttcgcaggatttttctgagccttttaccactccagcctagcccctaccccccaattaggagggcactggcccccaacaggcatcaccccgctaaatcccctagaagtcccactcctaaacacatccgtattactcgcatcaggagtatcaatcacctgagctcaccatagtctaatagaaaacaaccgaaaccaaataattcaagcactgcttattacaattttactgggtctctattttaccctcctacaagcctcagagtacttcgagtctcccttcaccatttccgacggcatctacggctcaacattttttgtagccacaggcttccacggacttcacgtcattattggctcaactttcctcactatctgcttcatccgccaactaatatttcactttacatccaaacatcactttggcttcgaagccgccgcctgatactggcattttgtagatgtggtttgactatttctgtatgtctccatctattgatgagggtcttactcttttagtataaatagtaccgttaacttccaattaactagttttgacaacattcaaaaaagagtaataaacttcgccttaattttaataatcaacaccctcctagccttactactaataattattacattttgactaccacaactcaacggctacatagaaaaatccaccccttacgagtgcggcttcgaccctatatcccccgcccgcgtccctttctccataaaattcttcttagtagctattaccttcttattatttgatctagaaattgccctccttttacccctaccatgagccctacaaacaactaacctgccactaatagttatgtcatccctcttattaatcatcatcctagccctaagtctggcctatgagtgactacaaaaaggattagactgaaccgaattggtatatagtttaaacaaaacgaatgatttcgactcattaaattatgataatcatatttaccaaatgcccctcatttacataaatattatactagcatttaccatctcacttctaggaatactagtatatcgctcacacctcatatcctccctactatgcctagaaggaataatactatcgctgttcattatagctactctcataaccctcaacacccactccctcttagccaatattgtgcctattgccatactagtctttgccgcctgcgaagcagcggtgggcctagccctactagtctcaatctccaacacatatggcctagactacgtacataacctaaacctactccaatgctaaaactaatcgtcccaacaattatattactaccactgacatgactttccaaaaaacacataatttgaatcaacacaaccacccacagcctaattattagcatcatccctctactattttttaaccaaatcaacaacaacctatttagctgttccccaaccttttcctccgaccccctaacaacccccctcctaatactaactacctgactcctacccctcacaatcatggcaagccaacgccacttatccagtgaaccactatcacgaaaaaaactctacctctctatactaatctccctacaaatctccttaattataacattcacagccacagaactaatcatattttatatcttcttcgaaaccacacttatccccaccttggctatcatcacccgatgaggcaaccagccagaacgcctgaacgcaggcacatacttcctattctacaccctagtaggctcccttcccctactcatcgcactaatttacactcacaacaccctaggctcactaaacattctactactcactctcactgcccaagaactatcaaactcctgagccaacaacttaatatgactagcttacacaatagcttttatagtaaagatacctctttacggactccacttatgactccctaaagcccatgtcgaagcccccatcgctgggtcaatagtacttgccgcagtactcttaaaactaggcggctatggtataatacgcctcacactcattctcaaccccctgacaaaacacatagcctaccccttccttgtactatccctatgaggcataattataacaagctccatctgcctacgacaaacagacctaaaatcgctcattgcatactcttcaatcagccacatagccctcgtagtaacagccattctcatccaaaccccctgaagcttcaccggcgcagtcattctcataatcgcccacgggcttacatcctcattactattctgcctagcaaactcaaactacgaacgcactcacagtcgcatcataatcctctctcaaggacttcaaactctactcccactaatagctttttgatgacttctagcaagcctcgctaacctcgccttaccccccactattaacctactgggagaactctctgtgctagtaaccacgttctcctgatcaaatatcactctcctacttacaggactcaacatactagtcacagccctatactccctctacatatttaccacaacacaatggggctcactcacccaccacattaacaacataaaaccctcattcacacgagaaaacaccctcatgttcatacacctatcccccattctcctcctatccctcaaccccgacatcattaccgggttttcctcttgtaaatatagtttaaccaaaacatcagattgtgaatctgacaacagaggcttacgaccccttatttaccgagaaagctcacaagaactgctaactcatgcccccatgtctaacaacatggctttctcaacttttaaaggataacagctatccattggtcttaggccccaaaaattttggtgcaactccaaataaaagtaataaccatgcacactactataaccaccctaaccctgacttccctaattccccccatccttaccaccctcgttaaccctaacaaaaaaaactcatacccccattatgtaaaatccattgtcgcatccacctttattatcagtctcttccccacaacaatattcatgtgcctagaccaagaagttattatctcgaactgacactgagccacaacccaaacaacccagctctccctaagcttcaaactagactacttctccataatattcatccctgtagcattgttcgttacatggtccatcatagaattctcactgtgatatataaactcagacccaaacattaatcagttcttcaaatatctactcatcttcctaattaccatactaatcttagttaccgctaacaacctattccaactgttcatcggctgagagggcgtaggaattatatccttcttgctcatcagttgatgatacgcccgagcagatgccaacacagcagccattcaagcaatcctatacaaccgtatcggcgatatcggtttcatcctcgccttagcatgatttatcctacactccaactcatgagacccacaacaaatagcccttctaaacgctaatccaagcctcaccccactactaggcctcctcctagcagcagcaggcaaatcagcccaattaggtctccacccctgactcccctcagccatagaaggccccaccccagtctcagccctactccactcaagcactatagttgtagcaggaatcttcttactcatccgcttccaccccctagcagaaaatagcccactaatccaaactctaacactatgcttaggcgctatcaccactctgttcgcagcagtctgcgcccttacacaaaatgacatcaaaaaaatcgtagccttctccacttcaagtcaactaggactcataatagttacaatcggcatcaaccaaccacacctagcattcctgcacatctgtacccacgccttcttcaaagccatactatttatgtgctccgggtccatcatccacaaccttaacaatgaacaagatattcgaaaaataggaggactactcaaaaccatacctctcacttcaacctccctcaccattggcagcctagcattagcaggaatacctttcctcacaggtttctactccaaagaccacatcatcgaaaccgcaaacatatcatacacaaacgcctgagccctatctattactctcatcgctacctccctgacaagcgcctatagcactcgaataattcttctcaccctaacaggtcaacctcgcttccccacccttactaacattaacgaaaataaccccaccctactaaaccccattaaacgcctggcagccggaagcctattcgcaggatttctcattactaacaacatttcccccgcatcccccttccaaacaacaatccccctctacctaaaactcacagccctcgctgtcactttcctaggacttctaacagccctagacctcaactacctaaccaacaaacttaaaataaaatccccactatgcacattttatttctccaacatactcggattctaccctagcatcacacaccgcacaatcccctatctaggccttcttacgagccaaaacctgcccctactcctcctagacctaacctgactagaaaagctattacctaaaacaatttcacagcaccaaatctccacctccatcatcacctcaacccaaaaaggcataattaaactttacttcctctctttcttcttcccactcatcctaaccctactcctaatcacataacctattcccccgagcaatctcaattacaatatatacaccaacaaacaatgttcaaccagtaactactactaatcaacgcccataatcatacaaagcccccgcaccaataggatcctcccgaatcaaccctgacccctctccttcataaattattcagcttcctacactattaaagtttaccacaaccaccaccccatcatactctttcacccacagcaccaatcctacctccatcgctaaccccactaaaacactcaccaagacctcaacccctgacccccatgcctcaggatactcctcaatagccatcgctgtagtatatccaaagacaaccatcattccccctaaataaattaaaaaaactattaaacccatataacctcccccaaaattcagaataataacacacccgaccacaccgctaacaatcaatactaaacccccataaataggagaaggcttagaagaaaaccccacaaaccccattactaaacccacactcaacagaaacaaagcatacatcattattctcgcacggactacaaccacgaccaatgatatgaaaaaccatcgttgtatttcaactacaagaacaccaatgaccccaatacgcaaaactaaccccctaataaaattaattaaccactcattcatcgacctccccaccccatccaacatctccgcatgatgaaacttcggctcactccttggcgcctgcctgatcctccaaatcaccacaggactattcctagccatgcactactcaccagacgcctcaaccgccttttcatcaatcgcccacatcactcgagacgtaaattatggctgaatcatccgctaccttcacgccaatggcgcctcaatattctttatctgcctcttcctacacatcgggcgaggcctatattacggatcatttctctactcagaaacctgaaacatcggcattatcctcctgcttgcaactatagcaacagccttcataggctatgtcctcccgtgaggccaaatatcattctgaggggccacagtaattacaaacttactatccgccatcccatacattgggacagacctagttcaatgaatctgaggaggctactcagtagacagtcccaccctcacacgattctttacctttcacttcatcttgcccttcattattgcagccctagcaacactccacctcctattcttgcacgaaacgggatcaaacaaccccctaggaatcacctcccattccgataaaatcaccttccacccttactacacaatcaaagacgccctcggcttacttctcttccttctctccttaatgacattaacactattctcaccagacctcctaggcgacccagacaattataccctagccaaccccttaaacacccctccccacatcaagcccgaatgatatttcctattcgcctacacaattctccgatccgtccctaacaaactaggaggcgtccttgccctattactatccatcctcatcctagcaataatccccatcctccatatatccaaacaacaaagcataatatttcgcccactaagccaatcactttattgactcctagccgcagacctcctcattctaacctgaatcggaggacaaccagtaagctacccttttaccatcattggacaagtagcatccgtactatacttcacaacaatcctaatcctaataccaactatctccctaattgaaaacaaaatactcaaatgggcctgtccttgtagtataaactaatacaccagtcttgtaaaccggagatgaaaacctttttccaaggacaaatcagagaaaaagtctttaactccaccattagcacccaaagctaagattctaatttaaactattctctgttctttcatggggaagcagatttgggtaccacccaagtattgactcacccatcaacaaccgctatgtatttcgtacattactgccagccaccatgaatattgtacggtaccataaatacttgaccacctgtagtacataaaaacccaatccacatcaaaaccccctccccatgcttacaagcaagtacagcaatcaaccctcaactatcacacatcaactgcaactccaaagccacccctcacccactaggataccaacaaacctacccacccttaacagtacatagtacataaagccatttaccgtacatagcacattacagtcaaatcccttctcgtccccatggatgacccccctcagataggggtcccttgaccaccatcctccgtgaaatcaatatcccgcacaagagtgctactctcctcgctccgggcccataacacttgggggtagctaaagtgaactgtatccgacatctggttcctacttcagggtcataaagcctaaatagcccacacgttccccttaaataagacatcacgatg

SEQ ID NO: 106 - DNA, 16567 bp, Homo sapiens mitochondrial DNA
  deletion (513)..(513): 513DEL A
gatcacaggtctatcaccctattaaccactcacgggagctctccatgcatttggtattttcgtctggggggtatgcacgcgatagcattgcgagacgctggagccggagcaccctatgtcgcagtatctgtctttgattcctgcctcatcctattatttatcgcacctacgttcaatattacaggcgaacatacttactaaagtgtgttaattaattaatgcttgtaggacataataataacaattgaatgtctgcacagccactttccacacagacatcataacaaaaaatttccaccaaaccccccctcccccgcttctggccacagcacttaaacacatctctgccaaaccccaaaaacaaagaaccctaacaccagcctaaccagatttcaaattttatcttttggcggtatgcacttttaacagtcaccccccaactaacacattattttcccctcccactcccatactactaatctcatcaatacaacccccgcccatcctacccacacacacacaccgctgctaaccccataccccgaaccaaccaaaccccaaagacaccccccacagtttatgtagcttacctcctcaaagcaatacactgaaaatgtttagacgggctcacatcaccccataaacaaataggtttggtcctagcctttctattagctcttagtaagattacacatgcaagcatccccgttccagtgagttcaccctctaaatcaccacgatcaaaaggaacaagcatcaagcacgcagcaatgcagctcaaaacgcttagcctagccacacccccacgggaaacagcagtgattaacctttagcaataaacgaaagtttaactaagctatactaaccccagggttggtcaatttcgtgccagccaccgcggtcacacgattaacccaagtcaatagaagccggcgtaaagagtgttttagatcaccccctccccaataaagctaaaactcacctgagttgtaaaaaactccagttgacacaaaatagactacgaaagtggctttaacatatctgaacacacaatagctaagacccaaactgggattagataccccactatgcttagccctaaacctcaacagttaaatcaacaaaactgctcgccagaacactacgagccacagcttaaaactcaaaggacctggcggtgcttcatatccctctagaggagcctgttctgtaatcgataaaccccgatcaacctcaccacctcttgctcagcctatataccgccatcttcagcaaaccctgatgaaggctacaaagtaagcgcaagtacccacgtaaagacgttaggtcaaggtgtagcccatgaggtggcaagaaatgggctacattttctaccccagaaaactacgatagcccttatgaaacttaagggtcgaaggtggatttagcagtaaactaagagtagagtgcttagttgaacagggccctgaagcgcgtacacaccgcccgtcaccctcctcaagtatacttcaaaggacatttaactaaaacccctacgcatttatatagaggagacaagtcgtaacatggtaagtgtactggaaagtgcacttggacgaaccagagtgtagcttaacacaaagcacccaacttacacttaggagatttcaacttaacttgaccgctctgagctaaacctagccccaaacccactccaccttactaccagacaaccttagccaaaccatttacccaaataaagtataggcgatagaaattgaaacctggcgcaatagatatagtaccgcaagggaaagatgaaaaattataaccaagcataatatagcaaggactaacccctataccttctgcataatgaattaactagaaataactttgcaaggagagccaaagctaagacccccgaaaccagacgagctacctaagaacagctaaaagagcacacccgtctatgtagcaaaatagtgggaagatttataggtagaggcgacaaacctaccgagcctggtgatagctggttgtccaagatagaatcttagttcaactttaaatttgcccacagaaccctctaaatccccttgtaaatttaactgttagtccaaagaggaacagctctttggacactaggaaaaaaccttgtagagagagtaaaaaatttaacacccatagtaggcctaaaagcagccaccaattaagaaagcgttcaagctcaacacccactacctaaaaaatcccaaacatataactgaactcctcacacccaattggaccaatctatcaccctatagaagaactaatgttagtataagtaacatgaaaacattctcctccgcataagcctgcgtcagattaaaacactgaactgacaattaacagcccaatatctacaatcaaccaacaagtcattattaccctcactgtcaacccaacacaggcatgctcataaggaaaggttaaaaaaagtaaaaggaactcggcaaatcttaccccgcctgtttaccaaaaacatcacctctagcatcaccagtattagaggcaccgcctgcccagtgacacatgtttaacggccgcggtaccctaaccgtgcaaaggtagcataatcacttgttccttaaatagggacctgtatgaatggctccacgagggttcagctgtctcttacttttaaccagtgaaattgacctgcccgtgaagaggcgggcataacacagcaagacgagaagaccctatggagctttaatttattaatgcaaacagtacctaacaaacccacaggtcctaaactaccaaacctgcattaaaaatttcggttggggcgacctcggagcagaacccaacctccgagcagtacatgctaagacttcaccagtcaaagcgaactactatactcaattgatccaataacttgaccaacggaacaagttaccctagggataacagcgcaatcctattctagagtccatatcaacaatagggtttacgacctcgatgttggatcaggacatcccgatggtgcagccgctattaaaggttcgtttgttcaacgattaaagtcctacgtgatctgagttcagaccggagtaatccaggtcggtttctatctacttcaaattcctccctgtacgaaaggacaagagaaataaggcctacttcacaaagcgccttcccccgtaaatgatatcatctcaacttagtattatacccacacccacccaagaacagggtttgttaagatggcagagcccggtaatcgcataaaacttaaaactttacagtcagaggttcaattcctcttcttaacaacatacccatggccaacctcctactcctcattgtacccattctaatcgcaatggcattcctaatgcttaccgaacgaaaaattctaggctatatacaactacgcaaaggccccaacgttgtaggcccctacgggctactacaacccttcgctgacgccataaaactcttcaccaaagagcccctaaaacccgccacatctaccatcaccctctacatcaccgccccgaccttagctctcaccatcgctcttctactatgaacccccctccccatacccaaccccctggtcaacctcaacctaggcctcctatttattctagccacctctagcctagccgtttactcaatcctctgatcagggtgagcatcaaactcaaactacgccctgatcggcgcactgcgagcagtagcccaaacaatctcatatgaagtcaccctagccatcattctactatcaacattactaataagtggctcctttaacctctccacccttatcacaacacaagaacacctctgattactcctgccatcatgacccttggccataatatgatttatctccacactagcagagaccaaccgaacccccttcgaccttgccgaaggggagtccgaactagtctcaggcttcaacatcgaatacgccgcaggccccttcgccctattcttcatagccgaatacacaaacattattataataaacaccctcaccactacaatcttcctaggaacaacatatgacgcactctcccctgaactctacacaacatattttgtcaccaagaccctacttctaacctccctgttcttatgaattcgaacagcatacccccgattccgctacgaccaactcatacacctcctatgaaaaaacttcctaccactcaccctagcattacttatatgatatgtctccatacccattacaatctccagcattccccctcaaacctaagaaatatgtctgataaaagagttactttgatagagtaaataataggagcttaaacccccttatttctaggactatgagaatcgaacccatccctgagaatccaaaattctccgtgccacctatcacaccccatcctaaagtaaggtcagctaaataagctatcgggcccataccccgaaaatgttggttatacccttcccgtactaattaatcccctggcccaacccgtcatctactctaccatctttgcaggcacactcatcacagcgctaagctcgcactgattttttacctgagtaggcctagaaataaacatgctagcttttattccagttctaaccaaaaaaataaaccctcgttccacagaagctgccatcaagtatttcctcacgcaagcaaccgcatccataatccttctaatagctatcctcttcaacaatatactctccggacaatgaaccataaccaatactaccaatcaatactcatcattaataatcataatagctatagcaataaaactaggaatagccccctttcacttctgagtcccagaggttacccaaggcacccctctgacatccggcctgcttcttctcacatgacaaaaactagcccccatctcaatcatataccaaatctctccctcactaaacgtaagccttctcctcactctctcaatcttatccatcatagcaggcagttgaggtggattaaaccaaacccagctacgcaaaatcttagcatactcctcaattacccacataggatgaataatagcagttctaccgtacaaccctaacataaccattcttaatttaactatttatattatcctaactactaccgcattcctactactcaacttaaactccagcaccacgaccctactactatctcgcacctgaaacaagctaacatgactaacacccttaattccatccaccctcctctccctaggaggcctgcccccgctaaccggctttttgcccaaatgggccattatcgaagaattcacaaaaaacaatagcctcatcatccccaccatcatagccaccatcaccctccttaacctctacttctacctacgcctaatctactccacctcaatcacactactccccatatctaacaacgtaaaaataaaatgacagtttgaacatacaaaacccaccccattcctccccacactcatcgcccttaccacgctactcctacctatctccccttttatactaataatcttatagaaatttaggttaaatacagaccaagagccttcaaagccctcagtaagttgcaatacttaatttctgtaacagctaaggactgcaaaaccccactctgcatcaactgaacgcaaatcagccactttaattaagctaagcccttactagaccaatgggacttaaacccacaaacacttagttaacagctaagcaccctaatcaactggcttcaatctacttctcccgccgccgggaaaaaaggcgggagaagccccggcaggtttgaagctgcttcttcgaatttgcaattcaatatgaaaatcacctcggagctggtaaaaagaggcctaacccctgtctttagatttacagtccaatgcttcactcagccattttacctcacccccactgatgttcgccgaccgttgactattctctacaaaccacaaagacattggaacactatacctattattcggcgcatgagctggagtcctaggcacagctctaagcctccttattcgagccgagctgggccagccaggcaaccttctaggtaacgaccacatctacaacgttatcgtcacagcccatgcatttgtaataatcttcttcatagtaatacccatcataatcggaggctttggcaactgactagttcccctaataatcggtgcccccgatatggcgtttccccgcataaacaacataagcttctgactcttacctccctctctcctactcctgctcgcatctgctatagtggaggccggagcaggaacaggttgaacagtctaccctcccttagcagggaactactcccaccctggagcctccgtagacctaaccatcttctccttacacctagcaggtgtctcctctatcttaggggccatcaatttcatcacaacaattatcaatataaaaccccctgccataacccaataccaaacgcccctcttcgtctgatccgtcctaatcacagcagtcctacttctcctatctctcccagtcctagctgctggcatcactatactactaacagaccgcaacctcaacaccaccttcttcgaccccgccggaggaggagaccccattctataccaacacctattctgatttttcggtcaccctgaagtttatattcttatcctaccaggcttcggaataatctcccatattgtaacttactactccggaaaaaaagaaccatttggatacataggtatggtctgagctatgatatcaattggcttcctagggtttatcgtgtgagcacaccatatatttacagtaggaatagacgtagacacacgagcatatttcacctccgctaccataatcatcgctatccccaccggcgtcaaagtatttagctgactcgccacactccacggaagcaatatgaaatgatctgctgcagtgctctgagccctaggattcatctttcttttcaccgtaggtggcctgactggcattgtattagcaaactcatcactagacatcgtactacacgacacgtactacgttgtagcccacttccactatgtcctatcaataggagctgtatttgccatcataggaggcttcattcactgatttcccctattctcaggctacaccctagaccaaacctacgccaaaatccatttcactatcatattcatcggcgtaaatctaactttcttcccacaacactttctcggcctatccggaatgccccgacgttactcggactaccccgatgcatacaccacatgaaacatcctatcatctgtaggctcattcatttctctaacagcagtaatattaataattttcatgatttgagaagccttcgcttcgaagcgaaaagtcctaatagtagaagaaccctccataaacctggagtgactatatggatgccccccaccctaccacacattcgaagaacccgtatacataaaatctagacaaaaaaggaaggaatcgaaccccccaaagctggtttcaagccaaccccatggcctccatgactttttcaaaaaggtattagaaaaaccatttcataactttgtcaaagttaaattataggctaaatcctatatatcttaatggcacatgcagcgcaagtaggtctacaagacgctacttcccctatcatagaagagcttatcacctttcatgatcacgccctcataatcattttccttatctgcttcctagtcctgtatgcccttttcctaacactcacaacaaaactaactaatactaacatctcagacgctcaggaaatagaaaccgtctgaactatcctgcccgccatcatcctagtcctcatcgccctcccatccctacgcatcctttacataacagacgaggtcaacgatccctcccttaccatcaaatcaattggccaccaatggtactgaacctacgagtacaccgactacggcggactaatcttcaactcctacatacttcccccattattcctagaaccaggcgacctgcgactccttgacgttgacaatcgagtagtactcccgattgaagcccccattcgtataataattacatcacaagacgtcttgcactcatgagctgtccccacattaggcttaaaaacagatgcaattcccggacgtctaaaccaaaccactttcaccgctacacgaccgggggtatactacggtcaatgctctgaaatctgtggagcaaaccacagtttcatgcccatcgtcctagaattaattcccctaaaaatctttgaaatagggcccgtatttaccctatagcaccccctctaccccctctagagcccactgtaaagctaacttagcattaaccttttaagttaaagattaagagaaccaacacctctttacagtgaaatgccccaactaaatactaccgtatggcccaccataattacccccatactccttacactattcctcatcacccaactaaaaatattaaacacaaactaccacctacctccctcaccaaagcccataaaaataaaaaattataacaaaccctgagaaccaaaatgaacgaaaatctgttcgcttcattcattgcccccacaatcctaggcctacccgccgcagtactgatcattctatttccccctctattgatccccacctccaaatatctcatcaacaaccgactaatcaccacccaacaatgactaatcaaactaacctcaaaacaaatgataaccatacacaacactaaaggacgaacctgatctcttatactagtatccttaatcatttttattgccacaactaacctcctcggactcctgcctcactcatttacaccaaccacccaactatctataaacctagccatggccatccccttatgagcgggcacagtgattataggctttcgctctaagattaaaaatgccctagcccacttcttaccacaaggcacacctacaccccttatccccatactagttattatcgaaaccatcagcctactcattcaaccaatagccctggccgtacgcctaaccgctaacattactgcaggccacctactcatgcacctaattggaagcgccaccctagcaatatcaaccattaaccttccctctacacttatcatcttcacaattctaattctactgactatcctagaaatcgctgtcgccttaatccaagcctacgttttcacacttctagtaagcctctacctgcacgacaacacataatgacccaccaatcacatgcctatcatatagtaaaacccagcccatgacccctaacaggggccctctcagccctcctaatgacctccggcctagccatgtgatttcacttccactccataacgctcctcatactaggcctactaaccaacacactaaccatataccaatgatggcgcgatgtaacacgagaaagcacataccaaggccaccacacaccacctgtccaaaaaggccttcgatacgggataatcctatttattacctcagaagtttttttcttcgcaggatttttctgagccttttaccactccagcctagcccctaccccccaattaggagggcactggcccccaacaggcatcaccccgctaaatcccctagaagtcccactcctaaacacatccgtattactcgcatcaggagtatcaatcacctgagctcaccatagtctaatagaaaacaaccgaaaccaaataattcaagcactgcttattacaattttactgggtctctattttaccctcctacaagcctcagagtacttcgagtctcccttcaccatttccgacggcatctacggctcaacattttttgtagccacaggcttccacggacttcacgtcattattggctcaactttcctcactatctgcttcatccgccaactaatatttcactttacatccaaacatcactttggcttcgaagccgccgcctgatactggcattttgtagatgtggtttgactatttctgtatgtctccatctattgatgagggtcttactcttttagtataaatagtaccgttaacttccaattaactagttttgacaacattcaaaaaagagtaataaacttcgccttaattttaataatcaacaccctcctagccttactactaataattattacattttgactaccacaactcaacggctacatagaaaaatccaccccttacgagtgcggcttcgaccctatatcccccgcccgcgtccctttctccataaaattcttcttagtagctattaccttcttattatttgatctagaaattgccctccttttacccctaccatgagccctacaaacaactaacctgccactaatagttatgtcatccctcttattaatcatcatcctagccctaagtctggcctatgagtgactacaaaaaggattagactgaaccgaattggtatatagtttaaacaaaacgaatgatttcgactcattaaattatgataatcatatttaccaaatgcccctcatttacataaatattatactagcatttaccatctcacttctaggaatactagtatatcgctcacacctcatatcctccctactatgcctagaaggaataatactatcgctgttcattatagctactctcataaccctcaacacccactccctcttagccaatattgtgcctattgccatactagtctttgccgcctgcgaagcagcggtgggcctagccctactagtctcaatctccaacacatatggcctagactacgtacataacctaaacctactccaatgctaaaactaatcgtcccaacaattatattactaccactgacatgactttccaaaaaacacataatttgaatcaacacaaccacccacagcctaattattagcatcatccctctactattttttaaccaaatcaacaacaacctatttagctgttccccaaccttttcctccgaccccctaacaacccccctcctaatactaactacctgactcctacccctcacaatcatggcaagccaacgccacttatccagtgaaccactatcacgaaaaaaactctacctctctatactaatctccctacaaatctccttaattataacattcacagccacagaactaatcatattttatatcttcttcgaaaccacacttatccccaccttggctatcatcacccgatgaggcaaccagccagaacgcctgaacgcaggcacatacttcctattctacaccctagtaggctcccttcccctactcatcgcactaatttacactcacaacaccctaggctcactaaacattctactactcactctcactgcccaagaactatcaaactcctgagccaacaacttaatatgactagcttacacaatagcttttatagtaaagatacctctttacggactccacttatgactccctaaagcccatgtcgaagcccccatcgctgggtcaatagtacttgccgcagtactcttaaaactaggcggctatggtataatacgcctcacactcattctcaaccccctgacaaaacacatagcctaccccttccttgtactatccctatgaggcataattataacaagctccatctgcctacgacaaacagacctaaaatcgctcattgcatactcttcaatcagccacatagccctcgtagtaacagccattctcatccaaaccccctgaagcttcaccggcgcagtcattctcataatcgcccacgggcttacatcctcattactattctgcctagcaaactcaaactacgaacgcactcacagtcgcatcataatcctctctcaaggacttcaaactctactcccactaatagctttttgatgacttctagcaagcctcgctaacctcgccttaccccccactattaacctactgggagaactctctgtgctagtaaccacgttctcctgatcaaatatcactctcctacttacaggactcaacatactagtcacagccctatactccctctacatatttaccacaacacaatggggctcactcacccaccacattaacaacataaaaccctcattcacacgagaaaacaccctcatgttcatacacctatcccccattctcctcctatccctcaaccccgacatcattaccgggttttcctcttgtaaatatagtttaaccaaaacatcagattgtgaatctgacaacagaggcttacgaccccttatttaccgagaaagctcacaagaactgctaactcatgcccccatgtctaacaacatggctttctcaacttttaaaggataacagctatccattggtcttaggccccaaaaattttggtgcaactccaaataaaagtaataaccatgcacactactataaccaccctaaccctgacttccctaattccccccatccttaccaccctcgttaaccctaacaaaaaaaactcatacccccattatgtaaaatccattgtcgcatccacctttattatcagtctcttccccacaacaatattcatgtgcctagaccaagaagttattatctcgaactgacactgagccacaacccaaacaacccagctctccctaagcttcaaactagactacttctccataatattcatccctgtagcattgttcgttacatggtccatcatagaattctcactgtgatatataaactcagacccaaacattaatcagttcttcaaatatctactcatcttcctaattaccatactaatcttagttaccgctaacaacctattccaactgttcatcggctgagagggcgtaggaattatatccttcttgctcatcagttgatgatacgcccgagcagatgccaacacagcagccattcaagcaatcctatacaaccgtatcggcgatatcggtttcatcctcgccttagcatgatttatcctacactccaactcatgagacccacaacaaatagcccttctaaacgctaatccaagcctcaccccactactaggcctcctcctagcagcagcaggcaaatcagcccaattaggtctccacccctgactcccctcagccatagaaggccccaccccagtctcagccctactccactcaagcactatagttgtagcaggaatcttcttactcatccgcttccaccccctagcagaaaatagcccactaatccaaactctaacactatgcttaggcgctatcaccactctgttcgcagcagtctgcgcccttacacaaaatgacatcaaaaaaatcgtagccttctccacttcaagtcaactaggactcataatagttacaatcggcatcaaccaaccacacctagcattcctgcacatctgtacccacgccttcttcaaagccatactatttatgtgctccgggtccatcatccacaaccttaacaatgaacaagatattcgaaaaataggaggactactcaaaaccatacctctcacttcaacctccctcaccattggcagcctagcattagcaggaatacctttcctcacaggtttctactccaaagaccacatcatcgaaaccgcaaacatatcatacacaaacgcctgagccctatctattactctcatcgctacctccctgacaagcgcctatagcactcgaataattcttctcaccctaacaggtcaacctcgcttccccacccttactaacattaacgaaaataaccccaccctactaaaccccattaaacgcctggcagccggaagcctattcgcaggatttctcattactaacaacatttcccccgcatcccccttccaaacaacaatccccctctacctaaaactcacagccctcgctgtcactttcctaggacttctaacagccctagacctcaactacctaaccaacaaacttaaaataaaatccccactatgcacattttatttctccaacatactcggattctaccctagcatcacacaccgcacaatcccctatctaggccttcttacgagccaaaacctgcccctactcctcctagacctaacctgactagaaaagctattacctaaaacaatttcacagcaccaaatctccacctccatcatcacctcaacccaaaaaggcataattaaactttacttcctctctttcttcttcccactcatcctaaccctactcctaatcacataacctattcccccgagcaatctcaattacaatatatacaccaacaaacaatgttcaaccagtaactactactaatcaacgcccataatcatacaaagcccccgcaccaataggatcctcccgaatcaaccctgacccctctccttcataaattattcagcttcctacactattaaagtttaccacaaccaccaccccatcatactctttcacccacagcaccaatcctacctccatcgctaaccccactaaaacactcaccaagacctcaacccctgacccccatgcctcaggatactcctcaatagccatcgctgtagtatatccaaagacaaccatcattccccctaaataaattaaaaaaactattaaacccatataacctcccccaaaattcagaataataacacacccgaccacaccgctaacaatcaatactaaacccccataaataggagaaggcttagaagaaaaccccacaaaccccattactaaacccacactcaacagaaacaaagcatacatcattattctcgcacggactacaaccacgaccaatgatatgaaaaaccatcgttgtatttcaactacaagaacaccaatgaccccaatacgcaaaactaaccccctaataaaattaattaaccactcattcatcgacctccccaccccatccaacatctccgcatgatgaaacttcggctcactccttggcgcctgcctgatcctccaaatcaccacaggactattcctagccatgcactactcaccagacgcctcaaccgccttttcatcaatcgcccacatcactcgagacgtaaattatggctgaatcatccgctaccttcacgccaatggcgcctcaatattctttatctgcctcttcctacacatcgggcgaggcctatattacggatcatttctctactcagaaacctgaaacatcggcattatcctcctgcttgcaactatagcaacagccttcataggctatgtcctcccgtgaggccaaatatcattctgaggggccacagtaattacaaacttactatccgccatcccatacattgggacagacctagttcaatgaatctgaggaggctactcagtagacagtcccaccctcacacgattctttacctttcacttcatcttgcccttcattattgcagccctagcaacactccacctcctattcttgcacgaaacgggatcaaacaaccccctaggaatcacctcccattccgataaaatcaccttccacccttactacacaatcaaagacgccctcggcttacttctcttccttctctccttaatgacattaacactattctcaccagacctcctaggcgacccagacaattataccctagccaaccccttaaacacccctccccacatcaagcccgaatgatatttcctattcgcctacacaattctccgatccgtccctaacaaactaggaggcgtccttgccctattactatccatcctcatcctagcaataatccccatcctccatatatccaaacaacaaagcataatatttcgcccactaagccaatcactttattgactcctagccgcagacctcctcattctaacctgaatcggaggacaaccagtaagctacccttttaccatcattggacaagtagcatccgtactatacttcacaacaatcctaatcctaataccaactatctccctaattgaaaacaaaatactcaaatgggcctgtccttgtagtataaactaatacaccagtcttgtaaaccggagatgaaaacctttttccaaggacaaatcagagaaaaagtctttaactccaccattagcacccaaagctaagattctaatttaaactattctctgttctttcatggggaagcagatttgggtaccacccaagtattgactcacccatcaacaaccgctatgtatttcgtacattactgccagccaccatgaatattgtacggtaccataaatacttgaccacctgtagtacataaaaacccaatccacatcaaaaccccctccccatgcttacaagcaagtacagcaatcaaccctcaactatcacacatcaactgcaactccaaagccacccctcacccactaggataccaacaaacctacccacccttaacagtacatagtacataaagccatttaccgtacatagcacattacagtcaaatcccttctcgtccccatggatgacccccctcagataggggtcccttgaccaccatcctccgtgaaatcaatatcccgcacaagagtgctactctcctcgctccgggcccataacacttgggggtagctaaagtgaactgtatccgacatctggttcctacttcagggtcataaagcctaaatagcccacacgttccccttaaataagacatcacgatg

SEQ ID NO: 107 - DNA, 16567 bp, Homo sapiens mitochondrial DNA
  deletion (515)..(515): 515DEL A
gatcacaggtctatcaccctattaaccactcacgggagctctccatgcatttggtattttcgtctggggggtatgcacgcgatagcattgcgagacgctggagccggagcaccctatgtcgcagtatctgtctttgattcctgcctcatcctattatttatcgcacctacgttcaatattacaggcgaacatacttactaaagtgtgttaattaattaatgcttgtaggacataataataacaattgaatgtctgcacagccactttccacacagacatcataacaaaaaatttccaccaaaccccccctcccccgcttctggccacagcacttaaacacatctctgccaaaccccaaaaacaaagaaccctaacaccagcctaaccagatttcaaattttatcttttggcggtatgcacttttaacagtcaccccccaactaacacattattttcccctcccactcccatactactaatctcatcaatacaacccccgcccatcctacccagccacacacaccgctgctaaccccataccccgaaccaaccaaaccccaaagacaccccccacagtttatgtagcttacctcctcaaagcaatacactgaaaatgtttagacgggctcacatcaccccataaacaaataggtttggtcctagcctttctattagctcttagtaagattacacatgcaagcatccccgttccagtgagttcaccctctaaatcaccacgatcaaaaggaacaagcatcaagcacgcagcaatgcagctcaaaacgcttagcctagccacacccccacgggaaacagcagtgattaacctttagcaataaacgaaagtttaactaagctatactaaccccagggttggtcaatttcgtgccagccaccgcggtcacacgattaacccaagtcaatagaagccggcgtaaagagtgttttagatcaccccctccccaataaagctaaaactcacctgagttgtaaaaaactccagttgacacaaaatagactacgaaagtggctttaacatatctgaacacacaatagctaagacccaaactgggattagataccccactatgcttagccctaaacctcaacagttaaatcaacaaaactgctcgccagaacactacgagccacagcttaaaactcaaaggacctggcggtgcttcatatccctctagaggagcctgttctgtaatcgataaaccccgatcaacctcaccacctcttgctcagcctatataccgccatcttcagcaaaccctgatgaaggctacaaagtaagcgcaagtacccacgtaaagacgttaggtcaaggtgtagcccatgaggtggcaagaaatgggctacattttctaccccagaaaactacgatagcccttatgaaacttaagggtcgaaggtggatttagcagtaaactaagagtagagtgcttagttgaacagggccctgaagcgcgtacacaccgcccgtcaccctcctcaagtatacttcaaaggacatttaactaaaacccctacgcatttatatagaggagacaagtcgtaacatggtaagtgtactggaaagtgcacttggacgaaccagagtgtagcttaacacaaagcacccaacttacacttaggagatttcaacttaacttgaccgctctgagctaaacctagccccaaacccactccaccttactaccagacaaccttagccaaaccatttacccaaataaagtataggcgatagaaattgaaacctggcgcaatagatatagtaccgcaagggaaagatgaaaaattataaccaagcataatatagcaaggactaacccctataccttctgcataatgaattaactagaaataactttgcaaggagagccaaagctaagacccccgaaaccagacgagctacctaagaacagctaaaagagcacacccgtctatgtagcaaaatagtgggaagatttataggtagaggcgacaaacctaccgagcctggtgatagctggttgtccaagatagaatcttagttcaactttaaatttgcccacagaaccctctaaatccccttgtaaatttaactgttagtccaaagaggaacagctctttggacactaggaaaaaaccttgtagagagagtaaaaaatttaacacccatagtaggcctaaaagcagccaccaattaagaaagcgttcaagctcaacacccactacctaaaaaatcccaaacatataactgaactcctcacacccaattggaccaatctatcaccctatagaagaactaatgttagtataagtaacatgaaaacattctcctccgcataagcctgcgtcagattaaaacactgaactgacaattaacagcccaatatctacaatcaaccaacaagtcattattaccctcactgtcaacccaacacaggcatgctcataaggaaaggttaaaaaaagtaaaaggaactcggcaaatcttaccccgcctgtttaccaaaaacatcacctctagcatcaccagtattagaggcaccgcctgcccagtgacacatgtttaacggccgcggtaccctaaccgtgcaaaggtagcataatcacttgttccttaaatagggacctgtatgaatggctccacgagggttcagctgtctcttacttttaaccagtgaaattgacctgcccgtgaagaggcgggcataacacagcaagacgagaagaccctatggagctttaatttattaatgcaaacagtacctaacaaacccacaggtcctaaactaccaaacctgcattaaaaatttcggttggggcgacctcggagcagaacccaacctccgagcagtacatgctaagacttcaccagtcaaagcgaactactatactcaattgatccaataacttgaccaacggaacaagttaccctagggataacagcgcaatcctattctagagtccatatcaacaatagggtttacgacctcgatgttggatcaggacatcccgatggtgcagccgctattaaaggttcgtttgttcaacgattaaagtcctacgtgatctgagttcagaccggagtaatccaggtcggtttctatctacttcaaattcctccctgtacgaaaggacaagagaaataaggcctacttcacaaagcgccttcccccgtaaatgatatcatctcaacttagtattatacccacacccacccaagaacagggtttgttaagatggcagagcccggtaatcgcataaaacttaaaactttacagtcagaggttcaattcctcttcttaacaacatacccatggccaacctcctactcctcattgtacccattctaatcgcaatggcattcctaatgcttaccgaacgaaaaattctaggctatatacaactacgcaaaggccccaacgttgtaggcccctacgggctactacaacccttcgctgacgccataaaactcttcaccaaagagcccctaaaacccgccacatctaccatcaccctctacatcaccgccccgaccttagctctcaccatcgctcttctactatgaacccccctccccatacccaaccccctggtcaacctcaacctaggcctcctatttattctagccacctctagcctagccgtttactcaatcctctgatcagggtgagcatcaaactcaaactacgccctgatcggcgcactgcgagcagtagcccaaacaatctcatatgaagtcaccctagccatcattctactatcaacattactaataagtggctcctttaacctctccacccttatcacaacacaagaacacctctgattactcctgccatcatgacccttggccataatatgatttatctccacactagcagagaccaaccgaacccccttcgaccttgccgaaggggagtccgaactagtctcaggcttcaacatcgaatacgccgcaggccccttcgccctattcttcatagccgaatacacaaacattattataataaacaccctcaccactacaatcttcctaggaacaacatatgacgcactctcccctgaactctacacaacatattttgtcaccaagaccctacttctaacctccctgttcttatgaattcgaacagcatacccccgattccgctacgaccaactcatacacctcctatgaaaaaacttcctaccactcaccctagcattacttatatgatatgtctccatacccattacaatctccagcattccccctcaaacctaagaaatatgtctgataaaagagttactttgatagagtaaataataggagcttaaacccccttatttctaggactatgagaatcgaacccatccctgagaatccaaaattctccgtgccacctatcacaccccatcctaaagtaaggtcagctaaataagctatcgggcccataccccgaaaatgttggttatacccttcccgtactaattaatcccctggcccaacccgtcatctactctaccatctttgcaggcacactcatcacagcgctaagctcgcactgattttttacctgagtaggcctagaaataaacatgctagcttttattccagttctaaccaaaaaaataaaccctcgttccacagaagctgccatcaagtatttcctcacgcaagcaaccgcatccataatccttctaatagctatcctcttcaacaatatactctccggacaatgaaccataaccaatactaccaatcaatactcatcattaataatcataatagctatagcaataaaactaggaatagccccctttcacttctgagtcccagaggttacccaaggcacccctctgacatccggcctgcttcttctcacatgacaaaaactagcccccatctcaatcatataccaaatctctccctcactaaacgtaagccttctcctcactctctcaatcttatccatcatagcaggcagttgaggtggattaaaccaaacccagctacgcaaaatcttagcatactcctcaattacccacataggatgaataatagcagttctaccgtacaaccctaacataaccattcttaatttaactatttatattatcctaactactaccgcattcctactactcaacttaaactccagcaccacgaccctactactatctcgcacctgaaacaagctaacatgactaacacccttaattccatccaccctcctctccctaggaggcctgcccccgctaaccggctttttgcccaaatgggccattatcgaagaattcacaaaaaacaatagcctcatcatccccaccatcatagccaccatcaccctccttaacctctacttctacctacgcctaatctactccacctcaatcacactactccccatatctaacaacgtaaaaataaaatgacagtttgaacatacaaaacccaccccattcctccccacactcatcgcccttaccacgctactcctacctatctccccttttatactaataatcttatagaaatttaggttaaatacagaccaagagccttcaaagccctcagtaagttgcaatacttaatttctgtaacagctaaggactgcaaaaccccactctgcatcaactgaacgcaaatcagccactttaattaagctaagcccttactagaccaatgggacttaaacccacaaacacttagttaacagctaagcaccctaatcaactggcttcaatctacttctcccgccgccgggaaaaaaggcgggagaagccccggcaggtttgaagctgcttcttcgaatttgcaattcaatatgaaaatcacctcggagctggtaaaaagaggcctaacccctgtctttagatttacagtccaatgcttcactcagccattttacctcacccccactgatgttcgccgaccgttgactattctctacaaaccacaaagacattggaacactatacctattattcggcgcatgagctggagtcctaggcacagctctaagcctccttattcgagccgagctgggccagccaggcaaccttctaggtaacgaccacatctacaacgttatcgtcacagcccatgcatttgtaataatcttcttcatagtaatacccatcataatcggaggctttggcaactgactagttcccctaataatcggtgcccccgatatggcgtttccccgcataaacaacataagcttctgactcttacctccctctctcctactcctgctcgcatctgctatagtggaggccggagcaggaacaggttgaacagtctaccctcccttagcagggaactactcccaccctggagcctccgtagacctaaccatcttctccttacacctagcaggtgtctcctctatcttaggggccatcaatttcatcacaacaattatcaatataaaaccccctgccataacccaataccaaacgcccctcttcgtctgatccgtcctaatcacagcagtcctacttctcctatctctcccagtcctagctgctggcatcactatactactaacagaccgcaacctcaacaccaccttcttcgaccccgccggaggaggagaccccattctataccaacacctattctgatttttcggtcaccctgaagtttatattcttatcctaccaggcttcggaataatctcccatattgtaacttactactccggaaaaaaagaaccatttggatacataggtatggtctgagctatgatatcaattggcttcctagggtttatcgtgtgagcacaccatatatttacagtaggaatagacgtagacacacgagcatatttcacctccgctaccataatcatcgctatccccaccggcgtcaaagtatttagctgactcgccacactccacggaagcaatatgaaatgatctgctgcagtgctctgagccctaggattcatctttcttttcaccgtaggtggcctgactggcattgtattagcaaactcatcactagacatcgtactacacgacacgtactacgttgtagcccacttccactatgtcctatcaataggagctgtatttgccatcataggaggcttcattcactgatttcccctattctcaggctacaccctagaccaaacctacgccaaaatccatttcactatcatattcatcggcgtaaatctaactttcttcccacaacactttctcggcctatccggaatgccccgacgttactcggactaccccgatgcatacaccacatgaaacatcctatcatctgtaggctcattcatttctctaacagcagtaatattaataattttcatgatttgagaagccttcgcttcgaagcgaaaagtcctaatagtagaagaaccctccataaacctggagtgactatatggatgccccccaccctaccacacattcgaagaacccgtatacataaaatctagacaaaaaaggaaggaatcgaaccccccaaagctggtttcaagccaaccccatggcctccatgactttttcaaaaaggtattagaaaaaccatttcataactttgtcaaagttaaattataggctaaatcctatatatcttaatggcacatgcagcgcaagtaggtctacaagacgctacttcccctatcatagaagagcttatcacctttcatgatcacgccctcataatcattttccttatctgcttcctagtcctgtatgcccttttcctaacactcacaacaaaactaactaatactaacatctcagacgctcaggaaatagaaaccgtctgaactatcctgcccgccatcatcctagtcctcatcgccctcccatccctacgcatcctttacataacagacgaggtcaacgatccctcccttaccatcaaatcaattggccaccaatggtactgaacctacgagtacaccgactacggcggactaatcttcaactcctacatacttcccccattattcctagaaccaggcgacctgcgactccttgacgttgacaatcgagtagtactcccgattgaagcccccattcgtataataattacatcacaagacgtcttgcactcatgagctgtccccacattaggcttaaaaacagatgcaattcccggacgtctaaaccaaaccactttcaccgctacacgaccgggggtatactacggtcaatgctctgaaatctgtggagcaaaccacagtttcatgcccatcgtcctagaattaattcccctaaaaatctttgaaatagggcccgtatttaccctatagcaccccctctaccccctctagagcccactgtaaagctaacttagcattaaccttttaagttaaagattaagagaaccaacacctctttacagtgaaatgccccaactaaatactaccgtatggcccaccataattacccccatactccttacactattcctcatcacccaactaaaaatattaaacacaaactaccacctacctccctcaccaaagcccataaaaataaaaaattataacaaaccctgagaaccaaaatgaacgaaaatctgttcgcttcattcattgcccccacaatcctaggcctacccgccgcagtactgatcattctatttccccctctattgatccccacctccaaatatctcatcaacaaccgactaatcaccacccaacaatgactaatcaaactaacctcaaaacaaatgataaccatacacaacactaaaggacgaacctgatctcttatactagtatccttaatcatttttattgccacaactaacctcctcggactcctgcctcactcatttacaccaaccacccaactatctataaacctagccatggccatccccttatgagcgggcacagtgattataggctttcgctctaagattaaaaatgccctagcccacttcttaccacaaggcacacctacaccccttatccccatactagttattatcgaaaccatcagcctactcattcaaccaatagccctggccgtacgcctaaccgctaacattactgcaggccacctactcatgcacctaattggaagcgccaccctagcaatatcaaccattaaccttccctctacacttatcatcttcacaattctaattctactgactatcctagaaatcgctgtcgccttaatccaagcctacgttttcacacttctagtaagcctctacctgcacgacaacacataatgacccaccaatcacatgcctatcatatagtaaaacccagcccatgacccctaacaggggccctctcagccctcctaatgacctccggcctagccatgtgatttcacttccactccataacgctcctcatactaggcctactaaccaacacactaaccatataccaatgatggcgcgatgtaacacgagaaagcacataccaaggccaccacacaccacctgtccaaaaaggccttcgatacgggataatcctatttattacctcagaagtttttttcttcgcaggatttttctgagccttttaccactccagcctagcccctaccccccaattaggagggcactggcccccaacaggcatcaccccgctaaatcccctagaagtcccactcctaaacacatccgtattactcgcatcaggagtatcaatcacctgagctcaccatagtctaatagaaaacaaccgaaaccaaataattcaagcactgcttattacaattttactgggtctctattttaccctcctacaagcctcagagtacttcgagtctcccttcaccatttccgacggcatctacggctcaacattttttgtagccacaggcttccacggacttcacgtcattattggctcaactttcctcactatctgcttcatccgccaactaatatttcactttacatccaaacatcactttggcttcgaagccgccgcctgatactggcattttgtagatgtggtttgactatttctgtatgtctccatctattgatgagggtcttactcttttagtataaatagtaccgttaacttccaattaactagttttgacaacattcaaaaaagagtaataaacttcgccttaattttaataatcaacaccctcctagccttactactaataattattacattttgactaccacaactcaacggctacatagaaaaatccaccccttacgagtgcggcttcgaccctatatcccccgcccgcgtccctttctccataaaattcttcttagtagctattaccttcttattatttgatctagaaattgccctccttttacccctaccatgagccctacaaacaactaacctgccactaatagttatgtcatccctcttattaatcatcatcctagccctaagtctggcctatgagtgactacaaaaaggattagactgaaccgaattggtatatagtttaaacaaaacgaatgatttcgactcattaaattatgataatcatatttaccaaatgcccctcatttacataaatattatactagcatttaccatctcacttctaggaatactagtatatcgctcacacctcatatcctccctactatgcctagaaggaataatactatcgctgttcattatagctactctcataaccctcaacacccactccctcttagccaatattgtgcctattgccatactagtctttgccgcctgcgaagcagcggtgggcctagccctactagtctcaatctccaacacatatggcctagactacgtacataacctaaacctactccaatgctaaaactaatcgtcccaacaattatattactaccactgacatgactttccaaaaaacacataatttgaatcaacacaaccacccacagcctaattattagcatcatccctctactattttttaaccaaatcaacaacaacctatttagctgttccccaaccttttcctccgaccccctaacaacccccctcctaatactaactacctgactcctacccctcacaatcatggcaagccaacgccacttatccagtgaaccactatcacgaaaaaaactctacctctctatactaatctccctacaaatctccttaattataacattcacagccacagaactaatcatattttatatcttcttcgaaaccacacttatccccaccttggctatcatcacccgatgaggcaaccagccagaacgcctgaacgcaggcacatacttcctattctacaccctagtaggctcccttcccctactcatcgcactaatttacactcacaacaccctaggctcactaaacattctactactcactctcactgcccaagaactatcaaactcctgagccaacaacttaatatgactagcttacacaatagcttttatagtaaagatacctctttacggactccacttatgactccctaaagcccatgtcgaagcccccatcgctgggtcaatagtacttgccgcagtactcttaaaactaggcggctatggtataatacgcctcacactcattctcaaccccctgacaaaacacatagcctaccccttccttgtactatccctatgaggcataattataacaagctccatctgcctacgacaaacagacctaaaatcgctcattgcatactcttcaatcagccacatagccctcgtagtaacagccattctcatccaaaccccctgaagcttcaccggcgcagtcattctcataatcgcccacgggcttacatcctcattactattctgcctagcaaactcaaactacgaacgcactcacagtcgcatcataatcctctctcaaggacttcaaactctactcccactaatagctttttgatgacttctagcaagcctcgctaacctcgccttaccccccactattaacctactgggagaactctctgtgctagtaaccacgttctcctgatcaaatatcactctcctacttacaggactcaacatactagtcacagccctatactccctctacatatttaccacaacacaatggggctcactcacccaccacattaacaacataaaaccctcattcacacgagaaaacaccctcatgttcatacacctatcccccattctcctcctatccctcaaccccgacatcattaccgggttttcctcttgtaaatatagtttaaccaaaacatcagattgtgaatctgacaacagaggcttacgaccccttatttaccgagaaagctcacaagaactgctaactcatgcccccatgtctaacaacatggctttctcaacttttaaaggataacagctatccattggtcttaggccccaaaaattttggtgcaactccaaataaaagtaataaccatgcacactactataaccaccctaaccctgacttccctaattccccccatccttaccaccctcgttaaccctaacaaaaaaaactcatacccccattatgtaaaatccattgtcgcatccacctttattatcagtctcttccccacaacaatattcatgtgcctagaccaagaagttattatctcgaactgacactgagccacaacccaaacaacccagctctccctaagcttcaaactagactacttctccataatattcatccctgtagcattgttcgttacatggtccatcatagaattctcactgtgatatataaactcagacccaaacattaatcagttcttcaaatatctactcatcttcctaattaccatactaatcttagttaccgctaacaacctattccaactgttcatcggctgagagggcgtaggaattatatccttcttgctcatcagttgatgatacgcccgagcagatgccaacacagcagccattcaagcaatcctatacaaccgtatcggcgatatcggtttcatcctcgccttagcatgatttatcctacactccaactcatgagacccacaacaaatagcccttctaaacgctaatccaagcctcaccccactactaggcctcctcctagcagcagcaggcaaatcagcccaattaggtctccacccctgactcccctcagccatagaaggccccaccccagtctcagccctactccactcaagcactatagttgtagcaggaatcttcttactcatccgcttccaccccctagcagaaaatagcccactaatccaaactctaacactatgcttaggcgctatcaccactctgttcgcagcagtctgcgcccttacacaaaatgacatcaaaaaaatcgtagccttctccacttcaagtcaactaggactcataatagttacaatcggcatcaaccaaccacacctagcattcctgcacatctgtacccacgccttcttcaaagccatactatttatgtgctccgggtccatcatccacaaccttaacaatgaacaagatattcgaaaaataggaggactactcaaaaccatacctctcacttcaacctccctcaccattggcagcctagcattagcaggaatacctttcctcacaggtttctactccaaagaccacatcatcgaaaccgcaaacatatcatacacaaacgcctgagccctatctattactctcatcgctacctccctgacaagcgcctatagcactcgaataattcttctcaccctaacaggtcaacctcgcttccccacccttactaacattaacgaaaataaccccaccctactaaaccccattaaacgcctggcagccggaagcctattcgcaggatttctcattactaacaacatttcccccgcatcccccttccaaacaacaatccccctctacctaaaactcacagccctcgctgtcactttcctaggacttctaacagccctagacctcaactacctaaccaacaaacttaaaataaaatccccactatgcacattttatttctccaacatactcggattctaccctagcatcacacaccgcacaatcccctatctaggccttcttacgagccaaaacctgcccctactcctcctagacctaacctgactagaaaagctattacctaaaacaatttcacagcaccaaatctccacctccatcatcacctcaacccaaaaaggcataattaaactttacttcctctctttcttcttcccactcatcctaaccctactcctaatcacataacctattcccccgagcaatctcaattacaatatatacaccaacaaacaatgttcaaccagtaactactactaatcaacgcccataatcatacaaagcccccgcaccaataggatcctcccgaatcaaccctgacccctctccttcataaattattcagcttcctacactattaaagtttaccacaaccaccaccccatcatactctttcacccacagcaccaatcctacctccatcgctaaccccactaaaacactcaccaagacctcaacccctgacccccatgcctcaggatactcctcaatagccatcgctgtagtatatccaaagacaaccatcattccccctaaataaattaaaaaaactattaaacccatataacctcccccaaaattcagaataataacacacccgaccacaccgctaacaatcaatactaaacccccataaataggagaaggcttagaagaaaaccccacaaaccccattactaaacccacactcaacagaaacaaagcatacatcattattctcgcacggactacaaccacgaccaatgatatgaaaaaccatcgttgtatttcaactacaagaacaccaatgaccccaatacgcaaaactaaccccctaataaaattaattaaccactcattcatcgacctccccaccccatccaacatctccgcatgatgaaacttcggctcactccttggcgcctgcctgatcctccaaatcaccacaggactattcctagccatgcactactcaccagacgcctcaaccgccttttcatcaatcgcccacatcactcgagacgtaaattatggctgaatcatccgctaccttcacgccaatggcgcctcaatattctttatctgcctcttcctacacatcgggcgaggcctatattacggatcatttctctactcagaaacctgaaacatcggcattatcctcctgcttgcaactatagcaacagccttcataggctatgtcctcccgtgaggccaaatatcattctgaggggccacagtaattacaaacttactatccgccatcccatacattgggacagacctagttcaatgaatctgaggaggctactcagtagacagtcccaccctcacacgattctttacctttcacttcatcttgcccttcattattgcagccctagcaacactccacctcctattcttgcacgaaacgggatcaaacaaccccctaggaatcacctcccattccgataaaatcaccttccacccttactacacaatcaaagacgccctcggcttacttctcttccttctctccttaatgacattaacactattctcaccagacctcctaggcgacccagacaattataccctagccaaccccttaaacacccctccccacatcaagcccgaatgatatttcctattcgcctacacaattctccgatccgtccctaacaaactaggaggcgtccttgccctattactatccatcctcatcctagcaataatccccatcctccatatatccaaacaacaaagcataatatttcgcccactaagccaatcactttattgactcctagccgcagacctcctcattctaacctgaatcggaggacaaccagtaagctacccttttaccatcattggacaagtagcatccgtactatacttcacaacaatcctaatcctaataccaactatctccctaattgaaaacaaaatactcaaatgggcctgtccttgtagtataaactaatacaccagtcttgtaaaccggagatgaaaacctttttccaaggacaaatcagagaaaaagtctttaactccaccattagcacccaaagctaagattctaatttaaactattctctgttctttcatggggaagcagatttgggtaccacccaagtattgactcacccatcaacaaccgctatgtatttcgtacattactgccagccaccatgaatattgtacggtaccataaatacttgaccacctgtagtacataaaaacccaatccacatcaaaaccccctccccatgcttacaagcaagtacagcaatcaaccctcaactatcacacatcaactgcaactccaaagccacccctcacccactaggataccaacaaacctacccacccttaacagtacatagtacataaagccatttaccgtacatagcacattacagtcaaatcccttctcgtccccatggatgacccccctcagataggggtcccttgaccaccatcctccgtgaaatcaatatcccgcacaagagtgctactctcctcgctccgggcccataacacttgggggtagctaaagtgaactgtatccgacatctggttcctacttcagggtcataaagcctaaatagcccacacgttccccttaaataagacatcacgatg

SEQ ID NO: 108 - DNA, 16567 bp, Homo sapiens mitochondrial DNA
  deletion (523)..(523): 523DEL A
gatcacaggtctatcaccctattaaccactcacgggagctctccatgcatttggtattttcgtctggggggtatgcacgcgatagcattgcgagacgctggagccggagcaccctatgtcgcagtatctgtctttgattcctgcctcatcctattatttatcgcacctacgttcaatattacaggcgaacatacttactaaagtgtgttaattaattaatgcttgtaggacataataataacaattgaatgtctgcacagccactttccacacagacatcataacaaaaaatttccaccaaaccccccctcccccgcttctggccacagcacttaaacacatctctgccaaaccccaaaaacaaagaaccctaacaccagcctaaccagatttcaaattttatcttttggcggtatgcacttttaacagtcaccccccaactaacacattattttcccctcccactcccatactactaatctcatcaatacaacccccgcccatcctacccagcacacacacccgctgctaaccccataccccgaaccaaccaaaccccaaagacaccccccacagtttatgtagcttacctcctcaaagcaatacactgaaaatgtttagacgggctcacatcaccccataaacaaataggtttggtcctagcctttctattagctcttagtaagattacacatgcaagcatccccgttccagtgagttcaccctctaaatcaccacgatcaaaaggaacaagcatcaagcacgcagcaatgcagctcaaaacgcttagcctagccacacccccacgggaaacagcagtgattaacctttagcaataaacgaaagtttaactaagctatactaaccccagggttggtcaatttcgtgccagccaccgcggtcacacgattaacccaagtcaatagaagccggcgtaaagagtgttttagatcaccccctccccaataaagctaaaactcacctgagttgtaaaaaactccagttgacacaaaatagactacgaaagtggctttaacatatctgaacacacaatagctaagacccaaactgggattagataccccactatgcttagccctaaacctcaacagttaaatcaacaaaactgctcgccagaacactacgagccacagcttaaaactcaaaggacctggcggtgcttcatatccctctagaggagcctgttctgtaatcgataaaccccgatcaacctcaccacctcttgctcagcctatataccgccatcttcagcaaaccctgatgaaggctacaaagtaagcgcaagtacccacgtaaagacgttaggtcaaggtgtagcccatgaggtggcaagaaatgggctacattttctaccccagaaaactacgatagcccttatgaaacttaagggtcgaaggtggatttagcagtaaactaagagtagagtgcttagttgaacagggccctgaagcgcgtacacaccgcccgtcaccctcctcaagtatacttcaaaggacatttaactaaaacccctacgcatttatatagaggagacaagtcgtaacatggtaagtgtactggaaagtgcacttggacgaaccagagtgtagcttaacacaaagcacccaacttacacttaggagatttcaacttaacttgaccgctctgagctaaacctagccccaaacccactccaccttactaccagacaaccttagccaaaccatttacccaaataaagtataggcgatagaaattgaaacctggcgcaatagatatagtaccgcaagggaaagatgaaaaattataaccaagcataatatagcaaggactaacccctataccttctgcataatgaattaactagaaataactttgcaaggagagccaaagctaagacccccgaaaccagacgagctacctaagaacagctaaaagagcacacccgtctatgtagcaaaatagtgggaagatttataggtagaggcgacaaacctaccgagcctggtgatagctggttgtccaagatagaatcttagttcaactttaaatttgcccacagaaccctctaaatccccttgtaaatttaactgttagtccaaagaggaacagctctttggacactaggaaaaaaccttgtagagagagtaaaaaatttaacacccatagtaggcctaaaagcagccaccaattaagaaagcgttcaagctcaacacccactacctaaaaaatcccaaacatataactgaactcctcacacccaattggaccaatctatcaccctatagaagaactaatgttagtataagtaacatgaaaacattctcctccgcataagcctgcgtcagattaaaacactgaactgacaattaacagcccaatatctacaatcaaccaacaagtcattattaccctcactgtcaacccaacacaggcatgctcataaggaaaggttaaaaaaagtaaaaggaactcggcaaatcttaccccgcctgtttaccaaaaacatcacctctagcatcaccagtattagaggcaccgcctgcccagtgacacatgtttaacggccgcggtaccctaaccgtgcaaaggtagcataatcacttgttccttaaatagggacctgtatgaatggctccacgagggttcagctgtctcttacttttaaccagtgaaattgacctgcccgtgaagaggcgggcataacacagcaagacgagaagaccctatggagctttaatttattaatgcaaacagtacctaacaaacccacaggtcctaaactaccaaacctgcattaaaaatttcggttggggcgacctcggagcagaacccaacctccgagcagtacatgctaagacttcaccagtcaaagcgaactactatactcaattgatccaataacttgaccaacggaacaagttaccctagggataacagcgcaatcctattctagagtccatatcaacaatagggtttacgacctcgatgttggatcaggacatcccgatggtgcagccgctattaaaggttcgtttgttcaacgattaaagtcctacgtgatctgagttcagaccggagtaatccaggtcggtttctatctacttcaaattcctccctgtacgaaaggacaagagaaataaggcctacttcacaaagcgccttcccccgtaaatgatatcatctcaacttagtattatacccacacccacccaagaacagggtttgttaagatggcagagcccggtaatcgcataaaacttaaaactttacagtcagaggttcaattcctcttcttaacaacatacccatggccaacctcctactcctcattgtacccattctaatcgcaatggcattcctaatgcttaccgaacgaaaaattctaggctatatacaactacgcaaaggccccaacgttgtaggcccctacgggctactacaacccttcgctgacgccataaaactcttcaccaaagagcccctaaaacccgccacatctaccatcaccctctacatcaccgccccgaccttagctctcaccatcgctcttctactatgaacccccctccccatacccaaccccctggtcaacctcaacctaggcctcctatttattctagccacctctagcctagccgtttactcaatcctctgatcagggtgagcatcaaactcaaactacgccctgatcggcgcactgcgagcagtagcccaaacaatctcatatgaagtcaccctagccatcattctactatcaacattactaataagtggctcctttaacctctccacccttatcacaacacaagaacacctctgattactcctgccatcatgacccttggccataatatgatttatctccacactagcagagaccaaccgaacccccttcgaccttgccgaaggggagtccgaactagtctcaggcttcaacatcgaatacgccgcaggccccttcgccctattcttcatagccgaatacacaaacattattataataaacaccctcaccactacaatcttcctaggaacaacatatgacgcactctcccctgaactctacacaacatattttgtcaccaagaccctacttctaacctccctgttcttatgaattcgaacagcatacccccgattccgctacgaccaactcatacacctcctatgaaaaaacttcctaccactcaccctagcattacttatatgatatgtctccatacccattacaatctccagcattccccctcaaacctaagaaatatgtctgataaaagagttactttgatagagtaaataataggagcttaaacccccttatttctaggactatgagaatcgaacccatccctgagaatccaaaattctccgtgccacctatcacaccccatcctaaagtaaggtcagctaaataagctatcgggcccataccccgaaaatgttggttatacccttcccgtactaattaatcccctggcccaacccgtcatctactctaccatctttgcaggcacactcatcacagcgctaagctcgcactgattttttacctgagtaggcctagaaataaacatgctagcttttattccagttctaaccaaaaaaataaaccctcgttccacagaagctgccatcaagtatttcctcacgcaagcaaccgcatccataatccttctaatagctatcctcttcaacaatatactctccggacaatgaaccataaccaatactaccaatcaatactcatcattaataatcataatagctatagcaataaaactaggaatagccccctttcacttctgagtcccagaggttacccaaggcacccctctgacatccggcctgcttcttctcacatgacaaaaactagcccccatctcaatcatataccaaatctctccctcactaaacgtaagccttctcctcactctctcaatcttatccatcatagcaggcagttgaggtggattaaaccaaacccagctacgcaaaatcttagcatactcctcaattacccacataggatgaataatagcagttctaccgtacaaccctaacataaccattcttaatttaactatttatattatcctaactactaccgcattcctactactcaacttaaactccagcaccacgaccctactactatctcgcacctgaaacaagctaacatgactaacacccttaattccatccaccctcctctccctaggaggcctgcccccgctaaccggctttttgcccaaatgggccattatcgaagaattcacaaaaaacaatagcctcatcatccccaccatcatagccaccatcaccctccttaacctctacttctacctacgcctaatctactccacctcaatcacactactccccatatctaacaacgtaaaaataaaatgacagtttgaacatacaaaacccaccccattcctccccacactcatcgcccttaccacgctactcctacctatctccccttttatactaataatcttatagaaatttaggttaaatacagaccaagagccttcaaagccctcagtaagttgcaatacttaatttctgtaacagctaaggactgcaaaaccccactctgcatcaactgaacgcaaatcagccactttaattaagctaagcccttactagaccaatgggacttaaacccacaaacacttagttaacagctaagcaccctaatcaactggcttcaatctacttctcccgccgccgggaaaaaaggcgggagaagccccggcaggtttgaagctgcttcttcgaatttgcaattcaatatgaaaatcacctcggagctggtaaaaagaggcctaacccctgtctttagatttacagtccaatgcttcactcagccattttacctcacccccactgatgttcgccgaccgttgactattctctacaaaccacaaagacattggaacactatacctattattcggcgcatgagctggagtcctaggcacagctctaagcctccttattcgagccgagctgggccagccaggcaaccttctaggtaacgaccacatctacaacgttatcgtcacagcccatgcatttgtaataatcttcttcatagtaatacccatcataatcggaggctttggcaactgactagttcccctaataatcggtgcccccgatatggcgtttccccgcataaacaacataagcttctgactcttacctccctctctcctactcctgctcgcatctgctatagtggaggccggagcaggaacaggttgaacagtctaccctcccttagcagggaactactcccaccctggagcctccgtagacctaaccatcttctccttacacctagcaggtgtctcctctatcttaggggccatcaatttcatcacaacaattatcaatataaaaccccctgccataacccaataccaaacgcccctcttcgtctgatccgtcctaatcacagcagtcctacttctcctatctctcccagtcctagctgctggcatcactatactactaacagaccgcaacctcaacaccaccttcttcgaccccgccggaggaggagaccccattctataccaacacctattctgatttttcggtcaccctgaagtttatattcttatcctaccaggcttcggaataatctcccatattgtaacttactactccggaaaaaaagaaccatttggatacataggtatggtctgagctatgatatcaattggcttcctagggtttatcgtgtgagcacaccatatatttacagtaggaatagacgtagacacacgagcatatttcacctccgctaccataatcatcgctatccccaccggcgtcaaagtatttagctgactcgccacactccacggaagcaatatgaaatgatctgctgcagtgctctgagccctaggattcatctttcttttcaccgtaggtggcctgactggcattgtattagcaaactcatcactagacatcgtactacacgacacgtactacgttgtagcccacttccactatgtcctatcaataggagctgtatttgccatcataggaggcttcattcactgatttcccctattctcaggctacaccctagaccaaacctacgccaaaatccatttcactatcatattcatcggcgtaaatctaactttcttcccacaacactttctcggcctatccggaatgccccgacgttactcggactaccccgatgcatacaccacatgaaacatcctatcatctgtaggctcattcatttctctaacagcagtaatattaataattttcatgatttgagaagccttcgcttcgaagcgaaaagtcctaatagtagaagaaccctccataaacctggagtgactatatggatgccccccaccctaccacacattcgaagaacccgtatacataaaatctagacaaaaaaggaaggaatcgaaccccccaaagctggtttcaagccaaccccatggcctccatgactttttcaaaaaggtattagaaaaaccatttcataactttgtcaaagttaaattataggctaaatcctatatatcttaatggcacatgcagcgcaagtaggtctacaagacgctacttcccctatcatagaagagcttatcacctttcatgatcacgccctcataatcattttccttatctgcttcctagtcctgtatgcccttttcctaacactcacaacaaaactaactaatactaacatctcagacgctcaggaaatagaaaccgtctgaactatcctgcccgccatcatcctagtcctcatcgccctcccatccctacgcatcctttacataacagacgaggtcaacgatccctcccttaccatcaaatcaattggccaccaatggtactgaacctacgagtacaccgactacggcggactaatcttcaactcctacatacttcccccattattcctagaaccaggcgacctgcgactccttgacgttgacaatcgagtagtactcccgattgaagcccccattcgtataataattacatcacaagacgtcttgcactcatgagctgtccccacattaggcttaaaaacagatgcaattcccggacgtctaaaccaaaccactttcaccgctacacgaccgggggtatactacggtcaatgctctgaaatctgtggagcaaaccacagtttcatgcccatcgtcctagaattaattcccctaaaaatctttgaaatagggcccgtatttaccctatagcaccccctctaccccctctagagcccactgtaaagctaacttagcattaaccttttaagttaaagattaagagaaccaacacctctttacagtgaaatgccccaactaaatactaccgtatggcccaccataattacccccatactccttacactattcctcatcacccaactaaaaatattaaacacaaactaccacctacctccctcaccaaagcccataaaaataaaaaattataacaaaccctgagaaccaaaatgaacgaaaatctgttcgcttcattcattgcccccacaatcctaggcctacccgccgcagtactgatcattctatttccccctctattgatccccacctccaaatatctcatcaacaaccgactaatcaccacccaacaatgactaatcaaactaacctcaaaacaaatgataaccatacacaacactaaaggacgaacctgatctcttatactagtatccttaatcatttttattgccacaactaacctcctcggactcctgcctcactcatttacaccaaccacccaactatctataaacctagccatggccatccccttatgagcgggcacagtgattataggctttcgctctaagattaaaaatgccctagcccacttcttaccacaaggcacacctacaccccttatccccatactagttattatcgaaaccatcagcctactcattcaaccaatagccctggccgtacgcctaaccgctaacattactgcaggccacctactcatgcacctaattggaagcgccaccctagcaatatcaaccattaaccttccctctacacttatcatcttcacaattctaattctactgactatcctagaaatcgctgtcgccttaatccaagcctacgttttcacacttctagtaagcctctacctgcacgacaacacataatgacccaccaatcacatgcctatcatatagtaaaacccagcccatgacccctaacaggggccctctcagccctcctaatgacctccggcctagccatgtgatttcacttccactccataacgctcctcatactaggcctactaaccaacacactaaccatataccaatgatggcgcgatgtaacacgagaaagcacataccaaggccaccacacaccacctgtccaaaaaggccttcgatacgggataatcctatttattacctcagaagtttttttcttcgcaggatttttctgagccttttaccactccagcctagcccctaccccccaattaggagggcactggcccccaacaggcatcaccccgctaaatcccctagaagtcccactcctaaacacatccgtattactcgcatcaggagtatcaatcacctgagctcaccatagtctaatagaaaacaaccgaaaccaaataattcaagcactgcttattacaattttactgggtctctattttaccctcctacaagcctcagagtacttcgagtctcccttcaccatttccgacggcatctacggctcaacattttttgtagccacaggcttccacggacttcacgtcattattggctcaactttcctcactatctgcttcatccgccaactaatatttcactttacatccaaacatcactttggcttcgaagccgccgcctgatactggcattttgtagatgtggtttgactatttctgtatgtctccatctattgatgagggtcttactcttttagtataaatagtaccgttaacttccaattaactagttttgacaacattcaaaaaagagtaataaacttcgccttaattttaataatcaacaccctcctagccttactactaataattattacattttgactaccacaactcaacggctacatagaaaaatccaccccttacgagtgcggcttcgaccctatatcccccgcccgcgtccctttctccataaaattcttcttagtagctattaccttcttattatttgatctagaaattgccctccttttacccctaccatgagccctacaaacaactaacctgccactaatagttatgtcatccctcttattaatcatcatcctagccctaagtctggcctatgagtgactacaaaaaggattagactgaaccgaattggtatatagtttaaacaaaacgaatgatttcgactcattaaattatgataatcatatttaccaaatgcccctcatttacataaatattatactagcatttaccatctcacttctaggaatactagtatatcgctcacacctcatatcctccctactatgcctagaaggaataatactatcgctgttcattatagctactctcataaccctcaacacccactccctcttagccaatattgtgcctattgccatactagtctttgccgcctgcgaagcagcggtgggcctagccctactagtctcaatctccaacacatatggcctagactacgtacataacctaaacctactccaatgctaaaactaatcgtcccaacaattatattactaccactgacatgactttccaaaaaacacataatttgaatcaacacaaccacccacagcctaattattagcatcatccctctactattttttaaccaaatcaacaacaacctatttagctgttccccaaccttttcctccgaccccctaacaacccccctcctaatactaactacctgactcctacccctcacaatcatggcaagccaacgccacttatccagtgaaccactatcacgaaaaaaactctacctctctatactaatctccctacaaatctccttaattataacattcacagccacagaactaatcatattttatatcttcttcgaaaccacacttatccccaccttggctatcatcacccgatgaggcaaccagccagaacgcctgaacgcaggcacatacttcctattctacaccctagtaggctcccttcccctactcatcgcactaatttacactcacaacaccctaggctcactaaacattctactactcactctcactgcccaagaactatcaaactcctgagccaacaacttaatatgactagcttacacaatagcttttatagtaaagatacctctttacggactccacttatgactccctaaagcccatgtcgaagcccccatcgctgggtcaatagtacttgccgcagtactcttaaaactaggcggctatggtataatacgcctcacactcattctcaaccccctgacaaaacacatagcctaccccttccttgtactatccctatgaggcataattataacaagctccatctgcctacgacaaacagacctaaaatcgctcattgcatactcttcaatcagccacatagccctcgtagtaacagccattctcatccaaaccccctgaagcttcaccggcgcagtcattctcataatcgcccacgggcttacatcctcattactattctgcctagcaaactcaaactacgaacgcactcacagtcgcatcataatcctctctcaaggacttcaaactctactcccactaatagctttttgatgacttctagcaagcctcgctaacctcgccttaccccccactattaacctactgggagaactctctgtgctagtaaccacgttctcctgatcaaatatcactctcctacttacaggactcaacatactagtcacagccctatactccctctacatatttaccacaacacaatggggctcactcacccaccacattaacaacataaaaccctcattcacacgagaaaacaccctcatgttcatacacctatcccccattctcctcctatccctcaaccccgacatcattaccgggttttcctcttgtaaatatagtttaaccaaaacatcagattgtgaatctgacaacagaggcttacgaccccttatttaccgagaaagctcacaagaactgctaactcatgcccccatgtctaacaacatggctttctcaacttttaaaggataacagctatccattggtcttaggccccaaaaattttggtgcaactccaaataaaagtaataaccatgcacactactataaccaccctaaccctgacttccctaattccccccatccttaccaccctcgttaaccctaacaaaaaaaactcatacccccattatgtaaaatccattgtcgcatccacctttattatcagtctcttccccacaacaatattcatgtgcctagaccaagaagttattatctcgaactgacactgagccacaacccaaacaacccagctctccctaagcttcaaactagactacttctccataatattcatccctgtagcattgttcgttacatggtccatcatagaattctcactgtgatatataaactcagacccaaacattaatcagttcttcaaatatctactcatcttcctaattaccatactaatcttagttaccgctaacaacctattccaactgttcatcggctgagagggcgtaggaattatatccttcttgctcatcagttgatgatacgcccgagcagatgccaacacagcagccattcaagcaatcctatacaaccgtatcggcgatatcggtttcatcctcgccttagcatgatttatcctacactccaactcatgagacccacaacaaatagcccttctaaacgctaatccaagcctcaccccactactaggcctcctcctagcagcagcaggcaaatcagcccaattaggtctccacccctgactcccctcagccatagaaggccccaccccagtctcagccctactccactcaagcactatagttgtagcaggaatcttcttactcatccgcttccaccccctagcagaaaatagcccactaatccaaactctaacactatgcttaggcgctatcaccactctgttcgcagcagtctgcgcccttacacaaaatgacatcaaaaaaatcgtagccttctccacttcaagtcaactaggactcataatagttacaatcggcatcaaccaaccacacctagcattcctgcacatctgtacccacgccttcttcaaagccatactatttatgtgctccgggtccatcatccacaaccttaacaatgaacaagatattcgaaaaataggaggactactcaaaaccatacctctcacttcaacctccctcaccattggcagcctagcattagcaggaatacctttcctcacaggtttctactccaaagaccacatcatcgaaaccgcaaacatatcatacacaaacgcctgagccctatctattactctcatcgctacctccctgacaagcgcctatagcactcgaataattcttctcaccctaacaggtcaacctcgcttccccacccttactaacattaacgaaaataaccccaccctactaaaccccattaaacgcctggcagccggaagcctattcgcaggatttctcattactaacaacatttcccccgcatcccccttccaaacaacaatccccctctacctaaaactcacagccctcgctgtcactttcctaggacttctaacagccctagacctcaactacctaaccaacaaacttaaaataaaatccccactatgcacattttatttctccaacatactcggattctaccctagcatcacacaccgcacaatcccctatctaggccttcttacgagccaaaacctgcccctactcctcctagacctaacctgactagaaaagctattacctaaaacaatttcacagcaccaaatctccacctccatcatcacctcaacccaaaaaggcataattaaactttacttcctctctttcttcttcccactcatcctaaccctactcctaatcacataacctattcccccgagcaatctcaattacaatatatacaccaacaaacaatgttcaaccagtaactactactaatcaacgcccataatcatacaaagcccccgcaccaataggatcctcccgaatcaaccctgacccctctccttcataaattattcagcttcctacactattaaagtttaccacaaccaccaccccatcatactctttcacccacagcaccaatcctacctccatcgctaaccccactaaaacactcaccaagacctcaacccctgacccccatgcctcaggatactcctcaatagccatcgctgtagtatatccaaagacaaccatcattccccctaaataaattaaaaaaactattaaacccatataacctcccccaaaattcagaataataacacacccgaccacaccgctaacaatcaatactaaacccccataaataggagaaggcttagaagaaaaccccacaaaccccattactaaacccacactcaacagaaacaaagcatacatcattattctcgcacggactacaaccacgaccaatgatatgaaaaaccatcgttgtatttcaactacaagaacaccaatgaccccaatacgcaaaactaaccccctaataaaattaattaaccactcattcatcgacctccccaccccatccaacatctccgcatgatgaaacttcggctcactccttggcgcctgcctgatcctccaaatcaccacaggactattcctagccatgcactactcaccagacgcctcaaccgccttttcatcaatcgcccacatcactcgagacgtaaattatggctgaatcatccgctaccttcacgccaatggcgcctcaatattctttatctgcctcttcctacacatcgggcgaggcctatattacggatcatttctctactcagaaacctgaaacatcggcattatcctcctgcttgcaactatagcaacagccttcataggctatgtcctcccgtgaggccaaatatcattctgaggggccacagtaattacaaacttactatccgccatcccatacattgggacagacctagttcaatgaatctgaggaggctactcagtagacagtcccaccctcacacgattctttacctttcacttcatcttgcccttcattattgcagccctagcaacactccacctcctattcttgcacgaaacgggatcaaacaaccccctaggaatcacctcccattccgataaaatcaccttccacccttactacacaatcaaagacgccctcggcttacttctcttccttctctccttaatgacattaacactattctcaccagacctcctaggcgacccagacaattataccctagccaaccccttaaacacccctccccacatcaagcccgaatgatatttcctattcgcctacacaattctccgatccgtccctaacaaactaggaggcgtccttgccctattactatccatcctcatcctagcaataatccccatcctccatatatccaaacaacaaagcataatatttcgcccactaagccaatcactttattgactcctagccgcagacctcctcattctaacctgaatcggaggacaaccagtaagctacccttttaccatcattggacaagtagcatccgtactatacttcacaacaatcctaatcctaataccaactatctccctaattgaaaacaaaatactcaaatgggcctgtccttgtagtataaactaatacaccagtcttgtaaaccggagatgaaaacctttttccaaggacaaatcagagaaaaagtctttaactccaccattagcacccaaagctaagattctaatttaaactattctctgttctttcatggggaagcagatttgggtaccacccaagtattgactcacccatcaacaaccgctatgtatttcgtacattactgccagccaccatgaatattgtacggtaccataaatacttgaccacctgtagtacataaaaacccaatccacatcaaaaccccctccccatgcttacaagcaagtacagcaatcaaccctcaactatcacacatcaactgcaactccaaagccacccctcacccactaggataccaacaaacctacccacccttaacagtacatagtacataaagccatttaccgtacatagcacattacagtcaaatcccttctcgtccccatggatgacccccctcagataggggtcccttgaccaccatcctccgtgaaatcaatatcccgcacaagagtgctactctcctcgctccgggcccataacacttgggggtagctaaagtgaactgtatccgacatctggttcctacttcagggtcataaagcctaaatagcccacacgttccccttaaataagacatcacgatg

SEQ ID NO: 109 - DNA, 16567 bp, Homo sapiens mitochondrial DNA
  deletion (13674)..(13674): 13674DEL C
gatcacaggtctatcaccctattaaccactcacgggagctctccatgcatttggtattttcgtctggggggtatgcacgcgatagcattgcgagacgctggagccggagcaccctatgtcgcagtatctgtctttgattcctgcctcatcctattatttatcgcacctacgttcaatattacaggcgaacatacttactaaagtgtgttaattaattaatgcttgtaggacataataataacaattgaatgtctgcacagccactttccacacagacatcataacaaaaaatttccaccaaaccccccctcccccgcttctggccacagcacttaaacacatctctgccaaaccccaaaaacaaagaaccctaacaccagcctaaccagatttcaaattttatcttttggcggtatgcacttttaacagtcaccccccaactaacacattattttcccctcccactcccatactactaatctcatcaatacaacccccgcccatcctacccagcacacacacaccgctgctaaccccataccccgaaccaaccaaaccccaaagacaccccccacagtttatgtagcttacctcctcaaagcaatacactgaaaatgtttagacgggctcacatcaccccataaacaaataggtttggtcctagcctttctattagctcttagtaagattacacatgcaagcatccccgttccagtgagttcaccctctaaatcaccacgatcaaaaggaacaagcatcaagcacgcagcaatgcagctcaaaacgcttagcctagccacacccccacgggaaacagcagtgattaacctttagcaataaacgaaagtttaactaagctatactaaccccagggttggtcaatttcgtgccagccaccgcggtcacacgattaacccaagtcaatagaagccggcgtaaagagtgttttagatcaccccctccccaataaagctaaaactcacctgagttgtaaaaaactccagttgacacaaaatagactacgaaagtggctttaacatatctgaacacacaatagctaagacccaaactgggattagataccccactatgcttagccctaaacctcaacagttaaatcaacaaaactgctcgccagaacactacgagccacagcttaaaactcaaaggacctggcggtgcttcatatccctctagaggagcctgttctgtaatcgataaaccccgatcaacctcaccacctcttgctcagcctatataccgccatcttcagcaaaccctgatgaaggctacaaagtaagcgcaagtacccacgtaaagacgttaggtcaaggtgtagcccatgaggtggcaagaaatgggctacattttctaccccagaaaactacgatagcccttatgaaacttaagggtcgaaggtggatttagcagtaaactaagagtagagtgcttagttgaacagggccctgaagcgcgtacacaccgcccgtcaccctcctcaagtatacttcaaaggacatttaactaaaacccctacgcatttatatagaggagacaagtcgtaacatggtaagtgtactggaaagtgcacttggacgaaccagagtgtagcttaacacaaagcacccaacttacacttaggagatttcaacttaacttgaccgctctgagctaaacctagccccaaacccactccaccttactaccagacaaccttagccaaaccatttacccaaataaagtataggcgatagaaattgaaacctggcgcaatagatatagtaccgcaagggaaagatgaaaaattataaccaagcataatatagcaaggactaacccctataccttctgcataatgaattaactagaaataactttgcaaggagagccaaagctaagacccccgaaaccagacgagctacctaagaacagctaaaagagcacacccgtctatgtagcaaaatagtgggaagatttataggtagaggcgacaaacctaccgagcctggtgatagctggttgtccaagatagaatcttagttcaactttaaatttgcccacagaaccctctaaatccccttgtaaatttaactgttagtccaaagaggaacagctctttggacactaggaaaaaaccttgtagagagagtaaaaaatttaacacccatagtaggcctaaaagcagccaccaattaagaaagcgttcaagctcaacacccactacctaaaaaatcccaaacatataactgaactcctcacacccaattggaccaatctatcaccctatagaagaactaatgttagtataagtaacatgaaaacattctcctccgcataagcctgcgtcagattaaaacactgaactgacaattaacagcccaatatctacaatcaaccaacaagtcattattaccctcactgtcaacccaacacaggcatgctcataaggaaaggttaaaaaaagtaaaaggaactcggcaaatcttaccccgcctgtttaccaaaaacatcacctctagcatcaccagtattagaggcaccgcctgcccagtgacacatgtttaacggccgcggtaccctaaccgtgcaaaggtagcataatcacttgttccttaaatagggacctgtatgaatggctccacgagggttcagctgtctcttacttttaaccagtgaaattgacctgcccgtgaagaggcgggcataacacagcaagacgagaagaccctatggagctttaatttattaatgcaaacagtacctaacaaacccacaggtcctaaactaccaaacctgcattaaaaatttcggttggggcgacctcggagcagaacccaacctccgagcagtacatgctaagacttcaccagtcaaagcgaactactatactcaattgatccaataacttgaccaacggaacaagttaccctagggataacagcgcaatcctattctagagtccatatcaacaatagggtttacgacctcgatgttggatcaggacatcccgatggtgcagccgctattaaaggttcgtttgttcaacgattaaagtcctacgtgatctgagttcagaccggagtaatccaggtcggtttctatctacttcaaattcctccctgtacgaaaggacaagagaaataaggcctacttcacaaagcgccttcccccgtaaatgatatcatctcaacttagtattatacccacacccacccaagaacagggtttgttaagatggcagagcccggtaatcgcataaaacttaaaactttacagtcagaggttcaattcctcttcttaacaacatacccatggccaacctcctactcctcattgtacccattctaatcgcaatggcattcctaatgcttaccgaacgaaaaattctaggctatatacaactacgcaaaggccccaacgttgtaggcccctacgggctactacaacccttcgctgacgccataaaactcttcaccaaagagcccctaaaacccgccacatctaccatcaccctctacatcaccgccccgaccttagctctcaccatcgctcttctactatgaacccccctccccatacccaaccccctggtcaacctcaacctaggcctcctatttattctagccacctctagcctagccgtttactcaatcctctgatcagggtgagcatcaaactcaaactacgccctgatcggcgcactgcgagcagtagcccaaacaatctcatatgaagtcaccctagccatcattctactatcaacattactaataagtggctcctttaacctctccacccttatcacaacacaagaacacctctgattactcctgccatcatgacccttggccataatatgatttatctccacactagcagagaccaaccgaacccccttcgaccttgccgaaggggagtccgaactagtctcaggcttcaacatcgaatacgccgcaggccccttcgccctattcttcatagccgaatacacaaacattattataataaacaccctcaccactacaatcttcctaggaacaacatatgacgcactctcccctgaactctacacaacatattttgtcaccaagaccctacttctaacctccctgttcttatgaattcgaacagcatacccccgattccgctacgaccaactcatacacctcctatgaaaaaacttcctaccactcaccctagcattacttatatgatatgtctccatacccattacaatctccagcattccccctcaaacctaagaaatatgtctgataaaagagttactttgatagagtaaataataggagcttaaacccccttatttctaggactatgagaatcgaacccatccctgagaatccaaaattctccgtgccacctatcacaccccatcctaaagtaaggtcagctaaataagctatcgggcccataccccgaaaatgttggttatacccttcccgtactaattaatcccctggcccaacccgtcatctactctaccatctttgcaggcacactcatcacagcgctaagctcgcactgattttttacctgagtaggcctagaaataaacatgctagcttttattccagttctaaccaaaaaaataaaccctcgttccacagaagctgccatcaagtatttcctcacgcaagcaaccgcatccataatccttctaatagctatcctcttcaacaatatactctccggacaatgaaccataaccaatactaccaatcaatactcatcattaataatcataatagctatagcaataaaactaggaatagccccctttcacttctgagtcccagaggttacccaaggcacccctctgacatccggcctgcttcttctcacatgacaaaaactagcccccatctcaatcatataccaaatctctccctcactaaacgtaagccttctcctcactctctcaatcttatccatcatagcaggcagttgaggtggattaaaccaaacccagctacgcaaaatcttagcatactcctcaattacccacataggatgaataatagcagttctaccgtacaaccctaacataaccattcttaatttaactatttatattatcctaactactaccgcattcctactactcaacttaaactccagcaccacgaccctactactatctcgcacctgaaacaagctaacatgactaacacccttaattccatccaccctcctctccctaggaggcctgcccccgctaaccggctttttgcccaaatgggccattatcgaagaattcacaaaaaacaatagcctcatcatccccaccatcatagccaccatcaccctccttaacctctacttctacctacgcctaatctactccacctcaatcacactactccccatatctaacaacgtaaaaataaaatgacagtttgaacatacaaaacccaccccattcctccccacactcatcgcccttaccacgctactcctacctatctccccttttatactaataatcttatagaaatttaggttaaatacagaccaagagccttcaaagccctcagtaagttgcaatacttaatttctgtaacagctaaggactgcaaaaccccactctgcatcaactgaacgcaaatcagccactttaattaagctaagcccttactagaccaatgggacttaaacccacaaacacttagttaacagctaagcaccctaatcaactggcttcaatctacttctcccgccgccgggaaaaaaggcgggagaagccccggcaggtttgaagctgcttcttcgaatttgcaattcaatatgaaaatcacctcggagctggtaaaaagaggcctaacccctgtctttagatttacagtccaatgcttcactcagccattttacctcacccccactgatgttcgccgaccgttgactattctctacaaaccacaaagacattggaacactatacctattattcggcgcatgagctggagtcctaggcacagctctaagcctccttattcgagccgagctgggccagccaggcaaccttctaggtaacgaccacatctacaacgttatcgtcacagcccatgcatttgtaataatcttcttcatagtaatacccatcataatcggaggctttggcaactgactagttcccctaataatcggtgcccccgatatggcgtttccccgcataaacaacataagcttctgactcttacctccctctctcctactcctgctcgcatctgctatagtggaggccggagcaggaacaggttgaacagtctaccctcccttagcagggaactactcccaccctggagcctccgtagacctaaccatcttctccttacacctagcaggtgtctcctctatcttaggggccatcaatttcatcacaacaattatcaatataaaaccccctgccataacccaataccaaacgcccctcttcgtctgatccgtcctaatcacagcagtcctacttctcctatctctcccagtcctagctgctggcatcactatactactaacagaccgcaacctcaacaccaccttcttcgaccccgccggaggaggagaccccattctataccaacacctattctgatttttcggtcaccctgaagtttatattcttatcctaccaggcttcggaataatctcccatattgtaacttactactccggaaaaaaagaaccatttggatacataggtatggtctgagctatgatatcaattggcttcctagggtttatcgtgtgagcacaccatatatttacagtaggaatagacgtagacacacgagcatatttcacctccgctaccataatcatcgctatccccaccggcgtcaaagtatttagctgactcgccacactccacggaagcaatatgaaatgatctgctgcagtgctctgagccctaggattcatctttcttttcaccgtaggtggcctgactggcattgtattagcaaactcatcactagacatcgtactacacgacacgtactacgttgtagcccacttccactatgtcctatcaataggagctgtatttgccatcataggaggcttcattcactgatttcccctattctcaggctacaccctagaccaaacctacgccaaaatccatttcactatcatattcatcggcgtaaatctaactttcttcccacaacactttctcggcctatccggaatgccccgacgttactcggactaccccgatgcatacaccacatgaaacatcctatcatctgtaggctcattcatttctctaacagcagtaatattaataattttcatgatttgagaagccttcgcttcgaagcgaaaagtcctaatagtagaagaaccctccataaacctggagtgactatatggatgccccccaccctaccacacattcgaagaacccgtatacataaaatctagacaaaaaaggaaggaatcgaaccccccaaagctggtttcaagccaaccccatggcctccatgactttttcaaaaaggtattagaaaaaccatttcataactttgtcaaagttaaattataggctaaatcctatatatcttaatggcacatgcagcgcaagtaggtctacaagacgctacttcccctatcatagaagagcttatcacctttcatgatcacgccctcataatcattttccttatctgcttcctagtcctgtatgcccttttcctaacactcacaacaaaactaactaatactaacatctcagacgctcaggaaatagaaaccgtctgaactatcctgcccgccatcatcctagtcctcatcgccctcccatccctacgcatcctttacataacagacgaggtcaacgatccctcccttaccatcaaatcaattggccaccaatggtactgaacctacgagtacaccgactacggcggactaatcttcaactcctacatacttcccccattattcctagaaccaggcgacctgcgactccttgacgttgacaatcgagtagtactcccgattgaagcccccattcgtataataattacatcacaagacgtcttgcactcatgagctgtccccacattaggcttaaaaacagatgcaattcccggacgtctaaaccaaaccactttcaccgctacacgaccgggggtatactacggtcaatgctctgaaatctgtggagcaaaccacagtttcatgcccatcgtcctagaattaattcccctaaaaatctttgaaatagggcccgtatttaccctatagcaccccctctaccccctctagagcccactgtaaagctaacttagcattaaccttttaagttaaagattaagagaaccaacacctctttacagtgaaatgccccaactaaatactaccgtatggcccaccataattacccccatactccttacactattcctcatcacccaactaaaaatattaaacacaaactaccacctacctccctcaccaaagcccataaaaataaaaaattataacaaaccctgagaaccaaaatgaacgaaaatctgttcgcttcattcattgcccccacaatcctaggcctacccgccgcagtactgatcattctatttccccctctattgatccccacctccaaatatctcatcaacaaccgactaatcaccacccaacaatgactaatcaaactaacctcaaaacaaatgataaccatacacaacactaaaggacgaacctgatctcttatactagtatccttaatcatttttattgccacaactaacctcctcggactcctgcctcactcatttacaccaaccacccaactatctataaacctagccatggccatccccttatgagcgggcacagtgattataggctttcgctctaagattaaaaatgccctagcccacttcttaccacaaggcacacctacaccccttatccccatactagttattatcgaaaccatcagcctactcattcaaccaatagccctggccgtacgcctaaccgctaacattactgcaggccacctactcatgcacctaattggaagcgccaccctagcaatatcaaccattaaccttccctctacacttatcatcttcacaattctaattctactgactatcctagaaatcgctgtcgccttaatccaagcctacgttttcacacttctagtaagcctctacctgcacgacaacacataatgacccaccaatcacatgcctatcatatagtaaaacccagcccatgacccctaacaggggccctctcagccctcctaatgacctccggcctagccatgtgatttcacttccactccataacgctcctcatactaggcctactaaccaacacactaaccatataccaatgatggcgcgatgtaacacgagaaagcacataccaaggccaccacacaccacctgtccaaaaaggccttcgatacgggataatcctatttattacctcagaagtttttttcttcgcaggatttttctgagccttttaccactccagcctagcccctaccccccaattaggagggcactggcccccaacaggcatcaccccgctaaatcccctagaagtcccactcctaaacacatccgtattactcgcatcaggagtatcaatcacctgagctcaccatagtctaatagaaaacaaccgaaaccaaataattcaagcactgcttattacaattttactgggtctctattttaccctcctacaagcctcagagtacttcgagtctcccttcaccatttccgacggcatctacggctcaacattttttgtagccacaggcttccacggacttcacgtcattattggctcaactttcctcactatctgcttcatccgccaactaatatttcactttacatccaaacatcactttggcttcgaagccgccgcctgatactggcattttgtagatgtggtttgactatttctgtatgtctccatctattgatgagggtcttactcttttagtataaatagtaccgttaacttccaattaactagttttgacaacattcaaaaaagagtaataaacttcgccttaattttaataatcaacaccctcctagccttactactaataattattacattttgactaccacaactcaacggctacatagaaaaatccaccccttacgagtgcggcttcgaccctatatcccccgcccgcgtccctttctccataaaattcttcttagtagctattaccttcttattatttgatctagaaattgccctccttttacccctaccatgagccctacaaacaactaacctgccactaatagttatgtcatccctcttattaatcatcatcctagccctaagtctggcctatgagtgactacaaaaaggattagactgaaccgaattggtatatagtttaaacaaaacgaatgatttcgactcattaaattatgataatcatatttaccaaatgcccctcatttacataaatattatactagcatttaccatctcacttctaggaatactagtatatcgctcacacctcatatcctccctactatgcctagaaggaataatactatcgctgttcattatagctactctcataaccctcaacacccactccctcttagccaatattgtgcctattgccatactagtctttgccgcctgcgaagcagcggtgggcctagccctactagtctcaatctccaacacatatggcctagactacgtacataacctaaacctactccaatgctaaaactaatcgtcccaacaattatattactaccactgacatgactttccaaaaaacacataatttgaatcaacacaaccacccacagcctaattattagcatcatccctctactattttttaaccaaatcaacaacaacctatttagctgttccccaaccttttcctccgaccccctaacaacccccctcctaatactaactacctgactcctacccctcacaatcatggcaagccaacgccacttatccagtgaaccactatcacgaaaaaaactctacctctctatactaatctccctacaaatctccttaattataacattcacagccacagaactaatcatattttatatcttcttcgaaaccacacttatccccaccttggctatcatcacccgatgaggcaaccagccagaacgcctgaacgcaggcacatacttcctattctacaccctagtaggctcccttcccctactcatcgcactaatttacactcacaacaccctaggctcactaaacattctactactcactctcactgcccaagaactatcaaactcctgagccaacaacttaatatgactagcttacacaatagcttttatagtaaagatacctctttacggactccacttatgactccctaaagcccatgtcgaagcccccatcgctgggtcaatagtacttgccgcagtactcttaaaactaggcggctatggtataatacgcctcacactcattctcaaccccctgacaaaacacatagcctaccccttccttgtactatccctatgaggcataattataacaagctccatctgcctacgacaaacagacctaaaatcgctcattgcatactcttcaatcagccacatagccctcgtagtaacagccattctcatccaaaccccctgaagcttcaccggcgcagtcattctcataatcgcccacgggcttacatcctcattactattctgcctagcaaactcaaactacgaacgcactcacagtcgcatcataatcctctctcaaggacttcaaactctactcccactaatagctttttgatgacttctagcaagcctcgctaacctcgccttaccccccactattaacctactgggagaactctctgtgctagtaaccacgttctcctgatcaaatatcactctcctacttacaggactcaacatactagtcacagccctatactccctctacatatttaccacaacacaatggggctcactcacccaccacattaacaacataaaaccctcattcacacgagaaaacaccctcatgttcatacacctatcccccattctcctcctatccctcaaccccgacatcattaccgggttttcctcttgtaaatatagtttaaccaaaacatcagattgtgaatctgacaacagaggcttacgaccccttatttaccgagaaagctcacaagaactgctaactcatgcccccatgtctaacaacatggctttctcaacttttaaaggataacagctatccattggtcttaggccccaaaaattttggtgcaactccaaataaaagtaataaccatgcacactactataaccaccctaaccctgacttccctaattccccccatccttaccaccctcgttaaccctaacaaaaaaaactcatacccccattatgtaaaatccattgtcgcatccacctttattatcagtctcttccccacaacaatattcatgtgcctagaccaagaagttattatctcgaactgacactgagccacaacccaaacaacccagctctccctaagcttcaaactagactacttctccataatattcatccctgtagcattgttcgttacatggtccatcatagaattctcactgtgatatataaactcagacccaaacattaatcagttcttcaaatatctactcatcttcctaattaccatactaatcttagttaccgctaacaacctattccaactgttcatcggctgagagggcgtaggaattatatccttcttgctcatcagttgatgatacgcccgagcagatgccaacacagcagccattcaagcaatcctatacaaccgtatcggcgatatcggtttcatcctcgccttagcatgatttatcctacactccaactcatgagacccacaacaaatagcccttctaaacgctaatccaagcctcaccccactactaggcctcctcctagcagcagcaggcaaatcagcccaattaggtctccacccctgactcccctcagccatagaaggccccaccccagtctcagccctactccactcaagcactatagttgtagcaggaatcttcttactcatccgcttccaccccctagcagaaaatagcccactaatccaaactctaacactatgcttaggcgctatcaccactctgttcgcagcagtctgcgcccttacacaaaatgacatcaaaaaaatcgtagccttctccacttcaagtcaactaggactcataatagttacaatcggcatcaaccaaccacacctagcattcctgcacatctgtacccacgccttcttcaaagccatactatttatgtgctccgggtccatcatccacaaccttaacaatgaacaagatattcgaaaaataggaggactactcaaaaccatacctctcacttcaacctccctcaccattggcagcctagcattagcaggaatacctttcctcacaggtttctactccaaagaccacatcatcgaaaccgcaaacatatcatacacaaacgcctgagccctatctattactctcatcgctacctccctgacaagcgcctatagcactcgaataattcttctcaccctaacaggtcaacctcgcttccccacccttactaacattaacgaaaaaaccccaccctactaaaccccattaaacgcctggcagccggaagcctattcgcaggatttctcattactaacaacatttcccccgcatcccccttccaaacaacaatccccctctacctaaaactcacagccctcgctgtcactttcctaggacttctaacagccctagacctcaactacctaaccaacaaacttaaaataaaatccccactatgcacattttatttctccaacatactcggattctaccctagcatcacacaccgcacaatcccctatctaggccttcttacgagccaaaacctgcccctactcctcctagacctaacctgactagaaaagctattacctaaaacaatttcacagcaccaaatctccacctccatcatcacctcaacccaaaaaggcataattaaactttacttcctctctttcttcttcccactcatcctaaccctactcctaatcacataacctattcccccgagcaatctcaattacaatatatacaccaacaaacaatgttcaaccagtaactactactaatcaacgcccataatcatacaaagcccccgcaccaataggatcctcccgaatcaaccctgacccctctccttcataaattattcagcttcctacactattaaagtttaccacaaccaccaccccatcatactctttcacccacagcaccaatcctacctccatcgctaaccccactaaaacactcaccaagacctcaacccctgacccccatgcctcaggatactcctcaatagccatcgctgtagtatatccaaagacaaccatcattccccctaaataaattaaaaaaactattaaacccatataacctcccccaaaattcagaataataacacacccgaccacaccgctaacaatcaatactaaacccccataaataggagaaggcttagaagaaaaccccacaaaccccattactaaacccacactcaacagaaacaaagcatacatcattattctcgcacggactacaaccacgaccaatgatatgaaaaaccatcgttgtatttcaactacaagaacaccaatgaccccaatacgcaaaactaaccccctaataaaattaattaaccactcattcatcgacctccccaccccatccaacatctccgcatgatgaaacttcggctcactccttggcgcctgcctgatcctccaaatcaccacaggactattcctagccatgcactactcaccagacgcctcaaccgccttttcatcaatcgcccacatcactcgagacgtaaattatggctgaatcatccgctaccttcacgccaatggcgcctcaatattctttatctgcctcttcctacacatcgggcgaggcctatattacggatcatttctctactcagaaacctgaaacatcggcattatcctcctgcttgcaactatagcaacagccttcataggctatgtcctcccgtgaggccaaatatcattctgaggggccacagtaattacaaacttactatccgccatcccatacattgggacagacctagttcaatgaatctgaggaggctactcagtagacagtcccaccctcacacgattctttacctttcacttcatcttgcccttcattattgcagccctagcaacactccacctcctattcttgcacgaaacgggatcaaacaaccccctaggaatcacctcccattccgataaaatcaccttccacccttactacacaatcaaagacgccctcggcttacttctcttccttctctccttaatgacattaacactattctcaccagacctcctaggcgacccagacaattataccctagccaaccccttaaacacccctccccacatcaagcccgaatgatatttcctattcgcctacacaattctccgatccgtccctaacaaactaggaggcgtccttgccctattactatccatcctcatcctagcaataatccccatcctccatatatccaaacaacaaagcataatatttcgcccactaagccaatcactttattgactcctagccgcagacctcctcattctaacctgaatcggaggacaaccagtaagctacccttttaccatcattggacaagtagcatccgtactatacttcacaacaatcctaatcctaataccaactatctccctaattgaaaacaaaatactcaaatgggcctgtccttgtagtataaactaatacaccagtcttgtaaaccggagatgaaaacctttttccaaggacaaatcagagaaaaagtctttaactccaccattagcacccaaagctaagattctaatttaaactattctctgttctttcatggggaagcagatttgggtaccacccaagtattgactcacccatcaacaaccgctatgtatttcgtacattactgccagccaccatgaatattgtacggtaccataaatacttgaccacctgtagtacataaaaacccaatccacatcaaaaccccctccccatgcttacaagcaagtacagcaatcaaccctcaactatcacacatcaactgcaactccaaagccacccctcacccactaggataccaacaaacctacccacccttaacagtacatagtacataaagccatttaccgtacatagcacattacagtcaaatcccttctcgtccccatggatgacccccctcagataggggtcccttgaccaccatcctccgtgaaatcaatatcccgcacaagagtgctactctcctcgctccgggcccataacacttgggggtagctaaagtgaactgtatccgacatctggttcctacttcagggtcataaagcctaaatagcccacacgttccccttaaataagacatcacgatg

SEQ ID NO: 110 - DNA, 16569 bp, Homo sapiens mitochondrial DNA
  insertion (81)..(82): 81.1INS T
gatcacaggtctatcaccctattaaccactcacgggagctctccatgcatttggtattttcgtctggggggtatgcacgcgtatagcattgcgagacgctggagccggagcaccctatgtcgcagtatctgtctttgattcctgcctcatcctattatttatcgcacctacgttcaatattacaggcgaacatacttactaaagtgtgttaattaattaatgcttgtaggacataataataacaattgaatgtctgcacagccactttccacacagacatcataacaaaaaatttccaccaaaccccccctcccccgcttctggccacagcacttaaacacatctctgccaaaccccaaaaacaaagaaccctaacaccagcctaaccagatttcaaattttatcttttggcggtatgcacttttaacagtcaccccccaactaacacattattttcccctcccactcccatactactaatctcatcaatacaacccccgcccatcctacccagcacacacacaccgctgctaaccccataccccgaaccaaccaaaccccaaagacaccccccacagtttatgtagcttacctcctcaaagcaatacactgaaaatgtttagacgggctcacatcaccccataaacaaataggtttggtcctagcctttctattagctcttagtaagattacacatgcaagcatccccgttccagtgagttcaccctctaaatcaccacgatcaaaaggaacaagcatcaagcacgcagcaatgcagctcaaaacgcttagcctagccacacccccacgggaaacagcagtgattaacctttagcaataaacgaaagtttaactaagctatactaaccccagggttggtcaatttcgtgccagccaccgcggtcacacgattaacccaagtcaatagaagccggcgtaaagagtgttttagatcaccccctccccaataaagctaaaactcacctgagttgtaaaaaactccagttgacacaaaatagactacgaaagtggctttaacatatctgaacacacaatagctaagacccaaactgggattagataccccactatgcttagccctaaacctcaacagttaaatcaacaaaactgctcgccagaacactacgagccacagcttaaaactcaaaggacctggcggtgcttcatatccctctagaggagcctgttctgtaatcgataaaccccgatcaacctcaccacctcttgctcagcctatataccgccatcttcagcaaaccctgatgaaggctacaaagtaagcgcaagtacccacgtaaagacgttaggtcaaggtgtagcccatgaggtggcaagaaatgggctacattttctaccccagaaaactacgatagcccttatgaaacttaagggtcgaaggtggatttagcagtaaactaagagtagagtgcttagttgaacagggccctgaagcgcgtacacaccgcccgtcaccctcctcaagtatacttcaaaggacatttaactaaaacccctacgcatttatatagaggagacaagtcgtaacatggtaagtgtactggaaagtgcacttggacgaaccagagtgtagcttaacacaaagcacccaacttacacttaggagatttcaacttaacttgaccgctctgagctaaacctagccccaaacccactccaccttactaccagacaaccttagccaaaccatttacccaaataaagtataggcgatagaaattgaaacctggcgcaatagatatagtaccgcaagggaaagatgaaaaattataaccaagcataatatagcaaggactaacccctataccttctgcataatgaattaactagaaataactttgcaaggagagccaaagctaagacccccgaaaccagacgagctacctaagaacagctaaaagagcacacccgtctatgtagcaaaatagtgggaagatttataggtagaggcgacaaacctaccgagcctggtgatagctggttgtccaagatagaatcttagttcaactttaaatttgcccacagaaccctctaaatccccttgtaaatttaactgttagtccaaagaggaacagctctttggacactaggaaaaaaccttgtagagagagtaaaaaatttaacacccatagtaggcctaaaagcagccaccaattaagaaagcgttcaagctcaacacccactacctaaaaaatcccaaacatataactgaactcctcacacccaattggaccaatctatcaccctatagaagaactaatgttagtataagtaacatgaaaacattctcctccgcataagcctgcgtcagattaaaacactgaactgacaattaacagcccaatatctacaatcaaccaacaagtcattattaccctcactgtcaacccaacacaggcatgctcataaggaaaggttaaaaaaagtaaaaggaactcggcaaatcttaccccgcctgtttaccaaaaacatcacctctagcatcaccagtattagaggcaccgcctgcccagtgacacatgtttaacggccgcggtaccctaaccgtgcaaaggtagcataatcacttgttccttaaatagggacctgtatgaatggctccacgagggttcagctgtctcttacttttaaccagtgaaattgacctgcccgtgaagaggcgggcataacacagcaagacgagaagaccctatggagctttaatttattaatgcaaacagtacctaacaaacccacaggtcctaaactaccaaacctgcattaaaaatttcggttggggcgacctcggagcagaacccaacctccgagcagtacatgctaagacttcaccagtcaaagcgaactactatactcaattgatccaataacttgaccaacggaacaagttaccctagggataacagcgcaatcctattctagagtccatatcaacaatagggtttacgacctcgatgttggatcaggacatcccgatggtgcagccgctattaaaggttcgtttgttcaacgattaaagtcctacgtgatctgagttcagaccggagtaatccaggtcggtttctatctacttcaaattcctccctgtacgaaaggacaagagaaataaggcctacttcacaaagcgccttcccccgtaaatgatatcatctcaacttagtattatacccacacccacccaagaacagggtttgttaagatggcagagcccggtaatcgcataaaacttaaaactttacagtcagaggttcaattcctcttcttaacaacatacccatggccaacctcctactcctcattgtacccattctaatcgcaatggcattcctaatgcttaccgaacgaaaaattctaggctatatacaactacgcaaaggccccaacgttgtaggcccctacgggctactacaacccttcgctgacgccataaaactcttcaccaaagagcccctaaaacccgccacatctaccatcaccctctacatcaccgccccgaccttagctctcaccatcgctcttctactatgaacccccctccccatacccaaccccctggtcaacctcaacctaggcctcctatttattctagccacctctagcctagccgtttactcaatcctctgatcagggtgagcatcaaactcaaactacgccctgatcggcgcactgcgagcagtagcccaaacaatctcatatgaagtcaccctagccatcattctactatcaacattactaataagtggctcctttaacctctccacccttatcacaacacaagaacacctctgattactcctgccatcatgacccttggccataatatgatttatctccacactagcagagaccaaccgaacccccttcgaccttgccgaaggggagtccgaactagtctcaggcttcaacatcgaatacgccgcaggccccttcgccctattcttcatagccgaatacacaaacattattataataaacaccctcaccactacaatcttcctaggaacaacatatgacgcactctcccctgaactctacacaacatattttgtcaccaagaccctacttctaacctccctgttcttatgaattcgaacagcatacccccgattccgctacgaccaactcatacacctcctatgaaaaaacttcctaccactcaccctagcattacttatatgatatgtctccatacccattacaatctccagcattccccctcaaacctaagaaatatgtctgataaaagagttactttgatagagtaaataataggagcttaaacccccttatttctaggactatgagaatcgaacccatccctgagaatccaaaattctccgtgccacctatcacaccccatcctaaagtaaggtcagctaaataagctatcgggcccataccccgaaaatgttggttatacccttcccgtactaattaatcccctggcccaacccgtcatctactctaccatctttgcaggcacactcatcacagcgctaagctcgcactgattttttacctgagtaggcctagaaataaacatgctagcttttattccagttctaaccaaaaaaataaaccctcgttccacagaagctgccatcaagtatttcctcacgcaagcaaccgcatccataatccttctaatagctatcctcttcaacaatatactctccggacaatgaaccataaccaatactaccaatcaatactcatcattaataatcataatagctatagcaataaaactaggaatagccccctttcacttctgagtcccagaggttacccaaggcacccctctgacatccggcctgcttcttctcacatgacaaaaactagcccccatctcaatcatataccaaatctctccctcactaaacgtaagccttctcctcactctctcaatcttatccatcatagcaggcagttgaggtggattaaaccaaacccagctacgcaaaatcttagcatactcctcaattacccacataggatgaataatagcagttctaccgtacaaccctaacataaccattcttaatttaactatttatattatcctaactactaccgcattcctactactcaacttaaactccagcaccacgaccctactactatctcgcacctgaaacaagctaacatgactaacacccttaattccatccaccctcctctccctaggaggcctgcccccgctaaccggctttttgcccaaatgggccattatcgaagaattcacaaaaaacaatagcctcatcatccccaccatcatagccaccatcaccctccttaacctctacttctacctacgcctaatctactccacctcaatcacactactccccatatctaacaacgtaaaaataaaatgacagtttgaacatacaaaacccaccccattcctccccacactcatcgcccttaccacgctactcctacctatctccccttttatactaataatcttatagaaatttaggttaaatacagaccaagagccttcaaagccctcagtaagttgcaatacttaatttctgtaacagctaaggactgcaaaaccccactctgcatcaactgaacgcaaatcagccactttaattaagctaagcccttactagaccaatgggacttaaacccacaaacacttagttaacagctaagcaccctaatcaactggcttcaatctacttctcccgccgccgggaaaaaaggcgggagaagccccggcaggtttgaagctgcttcttcgaatttgcaattcaatatgaaaatcacctcggagctggtaaaaagaggcctaacccctgtctttagatttacagtccaatgcttcactcagccattttacctcacccccactgatgttcgccgaccgttgactattctctacaaaccacaaagacattggaacactatacctattattcggcgcatgagctggagtcctaggcacagctctaagcctccttattcgagccgagctgggccagccaggcaaccttctaggtaacgaccacatctacaacgttatcgtcacagcccatgcatttgtaataatcttcttcatagtaatacccatcataatcggaggctttggcaactgactagttcccctaataatcggtgcccccgatatggcgtttccccgcataaacaacataagcttctgactcttacctccctctctcctactcctgctcgcatctgctatagtggaggccggagcaggaacaggttgaacagtctaccctcccttagcagggaactactcccaccctggagcctccgtagacctaaccatcttctccttacacctagcaggtgtctcctctatcttaggggccatcaatttcatcacaacaattatcaatataaaaccccctgccataacccaataccaaacgcccctcttcgtctgatccgtcctaatcacagcagtcctacttctcctatctctcccagtcctagctgctggcatcactatactactaacagaccgcaacctcaacaccaccttcttcgaccccgccggaggaggagaccccattctataccaacacctattctgatttttcggtcaccctgaagtttatattcttatcctaccaggcttcggaataatctcccatattgtaacttactactccggaaaaaaagaaccatttggatacataggtatggtctgagctatgatatcaattggcttcctagggtttatcgtgtgagcacaccatatatttacagtaggaatagacgtagacacacgagcatatttcacctccgctaccataatcatcgctatccccaccggcgtcaaagtatttagctgactcgccacactccacggaagcaatatgaaatgatctgctgcagtgctctgagccctaggattcatctttcttttcaccgtaggtggcctgactggcattgtattagcaaactcatcactagacatcgtactacacgacacgtactacgttgtagcccacttccactatgtcctatcaataggagctgtatttgccatcataggaggcttcattcactgatttcccctattctcaggctacaccctagaccaaacctacgccaaaatccatttcactatcatattcatcggcgtaaatctaactttcttcccacaacactttctcggcctatccggaatgccccgacgttactcggactaccccgatgcatacaccacatgaaacatcctatcatctgtaggctcattcatttctctaacagcagtaatattaataattttcatgatttgagaagccttcgcttcgaagcgaaaagtcctaatagtagaagaaccctccataaacctggagtgactatatggatgccccccaccctaccacacattcgaagaacccgtatacataaaatctagacaaaaaaggaaggaatcgaaccccccaaagctggtttcaagccaaccccatggcctccatgactttttcaaaaaggtattagaaaaaccatttcataactttgtcaaagttaaattataggctaaatcctatatatcttaatggcacatgcagcgcaagtaggtctacaagacgctacttcccctatcatagaagagcttatcacctttcatgatcacgccctcataatcattttccttatctgcttcctagtcctgtatgcccttttcctaacactcacaacaaaactaactaatactaacatctcagacgctcaggaaatagaaaccgtctgaactatcctgcccgccatcatcctagtcctcatcgccctcccatccctacgcatcctttacataacagacgaggtcaacgatccctcccttaccatcaaatcaattggccaccaatggtactgaacctacgagtacaccgactacggcggactaatcttcaactcctacatacttcccccattattcctagaaccaggcgacctgcgactccttgacgttgacaatcgagtagtactcccgattgaagcccccattcgtataataattacatcacaagacgtcttgcactcatgagctgtccccacattaggcttaaaaacagatgcaattcccggacgtctaaaccaaaccactttcaccgctacacgaccgggggtatactacggtcaatgctctgaaatctgtggagcaaaccacagtttcatgcccatcgtcctagaattaattcccctaaaaatctttgaaatagggcccgtatttaccctatagcaccccctctaccccctctagagcccactgtaaagctaacttagcattaaccttttaagttaaagattaagagaaccaacacctctttacagtgaaatgccccaactaaatactaccgtatggcccaccataattacccccatactccttacactattcctcatcacccaactaaaaatattaaacacaaactaccacctacctccctcaccaaagcccataaaaataaaaaattataacaaaccctgagaaccaaaatgaacgaaaatctgttcgcttcattcattgcccccacaatcctaggcctacccgccgcagtactgatcattctatttccccctctattgatccccacctccaaatatctcatcaacaaccgactaatcaccacccaacaatgactaatcaaactaacctcaaaacaaatgataaccatacacaacactaaaggacgaacctgatctcttatactagtatccttaatcatttttattgccacaactaacctcctcggactcctgcctcactcatttacaccaaccacccaactatctataaacctagccatggccatccccttatgagcgggcacagtgattataggctttcgctctaagattaaaaatgccctagcccacttcttaccacaaggcacacctacaccccttatccccatactagttattatcgaaaccatcagcctactcattcaaccaatagccctggccgtacgcctaaccgctaacattactgcaggccacctactcatgcacctaattggaagcgccaccctagcaatatcaaccattaaccttccctctacacttatcatcttcacaattctaattctactgactatcctagaaatcgctgtcgccttaatccaagcctacgttttcacacttctagtaagcctctacctgcacgacaacacataatgacccaccaatcacatgcctatcatatagtaaaacccagcccatgacccctaacaggggccctctcagccctcctaatgacctccggcctagccatgtgatttcacttccactccataacgctcctcatactaggcctactaaccaacacactaaccatataccaatgatggcgcgatgtaacacgagaaagcacataccaaggccaccacacaccacctgtccaaaaaggccttcgatacgggataatcctatttattacctcagaagtttttttcttcgcaggatttttctgagccttttaccactccagcctagcccctaccccccaattaggagggcactggcccccaacaggcatcaccccgctaaatcccctagaagtcccactcctaaacacatccgtattactcgcatcaggagtatcaatcacctgagctcaccatagtctaatagaaaacaaccgaaaccaaataattcaagcactgcttattacaattttactgggtctctattttaccctcctacaagcctcagagtacttcgagtctcccttcaccatttccgacggcatctacggctcaacattttttgtagccacaggcttccacggacttcacgtcattattggctcaactttcctcactatctgcttcatccgccaactaatatttcactttacatccaaacatcactttggcttcgaagccgccgcctgatactggcattttgtagatgtggtttgactatttctgtatgtctccatctattgatgagggtcttactcttttagtataaatagtaccgttaacttccaattaactagttttgacaacattcaaaaaagagtaataaacttcgccttaattttaataatcaacaccctcctagccttactactaataattattacattttgactaccacaactcaacggctacatagaaaaatccaccccttacgagtgcggcttcgaccctatatcccccgcccgcgtccctttctccataaaattcttcttagtagctattaccttcttattatttgatctagaaattgccctccttttacccctaccatgagccctacaaacaactaacctgccactaatagttatgtcatccctcttattaatcatcatcctagccctaagtctggcctatgagtgactacaaaaaggattagactgaaccgaattggtatatagtttaaacaaaacgaatgatttcgactcattaaattatgataatcatatttaccaaatgcccctcatttacataaatattatactagcatttaccatctcacttctaggaatactagtatatcgctcacacctcatatcctccctactatgcctagaaggaataatactatcgctgttcattatagctactctcataaccctcaacacccactccctcttagccaatattgtgcctattgccatactagtctttgccgcctgcgaagcagcggtgggcctagccctactagtctcaatctccaacacatatggcctagactacgtacataacctaaacctactccaatgctaaaactaatcgtcccaacaattatattactaccactgacatgactttccaaaaaacacataatttgaatcaacacaaccacccacagcctaattattagcatcatccctctactattttttaaccaaatcaacaacaacctatttagctgttccccaaccttttcctccgaccccctaacaacccccctcctaatactaactacctgactcctacccctcacaatcatggcaagccaacgccacttatccagtgaaccactatcacgaaaaaaactctacctctctatactaatctccctacaaatctccttaattataacattcacagccacagaactaatcatattttatatcttcttcgaaaccacacttatccccaccttggctatcatcacccgatgaggcaaccagccagaacgcctgaacgcaggcacatacttcctattctacaccctagtaggctcccttcccctactcatcgcactaatttacactcacaacaccctaggctcactaaacattctactactcactctcactgcccaagaactatcaaactcctgagccaacaacttaatatgactagcttacacaatagcttttatagtaaagatacctctttacggactccacttatgactccctaaagcccatgtcgaagcccccatcgctgggtcaatagtacttgccgcagtactcttaaaactaggcggctatggtataatacgcctcacactcattctcaaccccctgacaaaacacatagcctaccccttccttgtactatccctatgaggcataattataacaagctccatctgcctacgacaaacagacctaaaatcgctcattgcatactcttcaatcagccacatagccctcgtagtaacagccattctcatccaaaccccctgaagcttcaccggcgcagtcattctcataatcgcccacgggcttacatcctcattactattctgcctagcaaactcaaactacgaacgcactcacagtcgcatcataatcctctctcaaggacttcaaactctactcccactaatagctttttgatgacttctagcaagcctcgctaacctcgccttaccccccactattaacctactgggagaactctctgtgctagtaaccacgttctcctgatcaaatatcactctcctacttacaggactcaacatactagtcacagccctatactccctctacatatttaccacaacacaatggggctcactcacccaccacattaacaacataaaaccctcattcacacgagaaaacaccctcatgttcatacacctatcccccattctcctcctatccctcaaccccgacatcattaccgggttttcctcttgtaaatatagtttaaccaaaacatcagattgtgaatctgacaacagaggcttacgaccccttatttaccgagaaagctcacaagaactgctaactcatgcccccatgtctaacaacatggctttctcaacttttaaaggataacagctatccattggtcttaggccccaaaaattttggtgcaactccaaataaaagtaataaccatgcacactactataaccaccctaaccctgacttccctaattccccccatccttaccaccctcgttaaccctaacaaaaaaaactcatacccccattatgtaaaatccattgtcgcatccacctttattatcagtctcttccccacaacaatattcatgtgcctagaccaagaagttattatctcgaactgacactgagccacaacccaaacaacccagctctccctaagcttcaaactagactacttctccataatattcatccctgtagcattgttcgttacatggtccatcatagaattctcactgtgatatataaactcagacccaaacattaatcagttcttcaaatatctactcatcttcctaattaccatactaatcttagttaccgctaacaacctattccaactgttcatcggctgagagggcgtaggaattatatccttcttgctcatcagttgatgatacgcccgagcagatgccaacacagcagccattcaagcaatcctatacaaccgtatcggcgatatcggtttcatcctcgccttagcatgatttatcctacactccaactcatgagacccacaacaaatagcccttctaaacgctaatccaagcctcaccccactactaggcctcctcctagcagcagcaggcaaatcagcccaattaggtctccacccctgactcccctcagccatagaaggccccaccccagtctcagccctactccactcaagcactatagttgtagcaggaatcttcttactcatccgcttccaccccctagcagaaaatagcccactaatccaaactctaacactatgcttaggcgctatcaccactctgttcgcagcagtctgcgcccttacacaaaatgacatcaaaaaaatcgtagccttctccacttcaagtcaactaggactcataatagttacaatcggcatcaaccaaccacacctagcattcctgcacatctgtacccacgccttcttcaaagccatactatttatgtgctccgggtccatcatccacaaccttaacaatgaacaagatattcgaaaaataggaggactactcaaaaccatacctctcacttcaacctccctcaccattggcagcctagcattagcaggaatacctttcctcacaggtttctactccaaagaccacatcatcgaaaccgcaaacatatcatacacaaacgcctgagccctatctattactctcatcgctacctccctgacaagcgcctatagcactcgaataattcttctcaccctaacaggtcaacctcgcttccccacccttactaacattaacgaaaataaccccaccctactaaaccccattaaacgcctggcagccggaagcctattcgcaggatttctcattactaacaacatttcccccgcatcccccttccaaacaacaatccccctctacctaaaactcacagccctcgctgtcactttcctaggacttctaacagccctagacctcaactacctaaccaacaaacttaaaataaaatccccactatgcacattttatttctccaacatactcggattctaccctagcatcacacaccgcacaatcccctatctaggccttcttacgagccaaaacctgcccctactcctcctagacctaacctgactagaaaagctattacctaaaacaatttcacagcaccaaatctccacctccatcatcacctcaacccaaaaaggcataattaaactttacttcctctctttcttcttcccactcatcctaaccctactcctaatcacataacctattcccccgagcaatctcaattacaatatatacaccaacaaacaatgttcaaccagtaactactactaatcaacgcccataatcatacaaagcccccgcaccaataggatcctcccgaatcaaccctgacccctctccttcataaattattcagcttcctacactattaaagtttaccacaaccaccaccccatcatactctttcacccacagcaccaatcctacctccatcgctaaccccactaaaacactcaccaagacctcaacccctgacccccatgcctcaggatactcctcaatagccatcgctgtagtatatccaaagacaaccatcattccccctaaataaattaaaaaaactattaaacccatataacctcccccaaaattcagaataataacacacccgaccacaccgctaacaatcaatactaaacccccataaataggagaaggcttagaagaaaaccccacaaaccccattactaaacccacactcaacagaaacaaagcatacatcattattctcgcacggactacaaccacgaccaatgatatgaaaaaccatcgttgtatttcaactacaagaacaccaatgaccccaatacgcaaaactaaccccctaataaaattaattaaccactcattcatcgacctccccaccccatccaacatctccgcatgatgaaacttcggctcactccttggcgcctgcctgatcctccaaatcaccacaggactattcctagccatgcactactcaccagacgcctcaaccgccttttcatcaatcgcccacatcactcgagacgtaaattatggctgaatcatccgctaccttcacgccaatggcgcctcaatattctttatctgcctcttcctacacatcgggcgaggcctatattacggatcatttctctactcagaaacctgaaacatcggcattatcctcctgcttgcaactatagcaacagccttcataggctatgtcctcccgtgaggccaaatatcattctgaggggccacagtaattacaaacttactatccgccatcccatacattgggacagacctagttcaatgaatctgaggaggctactcagtagacagtcccaccctcacacgattctttacctttcacttcatcttgcccttcattattgcagccctagcaacactccacctcctattcttgcacgaaacgggatcaaacaaccccctaggaatcacctcccattccgataaaatcaccttccacccttactacacaatcaaagacgccctcggcttacttctcttccttctctccttaatgacattaacactattctcaccagacctcctaggcgacccagacaattataccctagccaaccccttaaacacccctccccacatcaagcccgaatgatatttcctattcgcctacacaattctccgatccgtccctaacaaactaggaggcgtccttgccctattactatccatcctcatcctagcaataatccccatcctccatatatccaaacaacaaagcataatatttcgcccactaagccaatcactttattgactcctagccgcagacctcctcattctaacctgaatcggaggacaaccagtaagctacccttttaccatcattggacaagtagcatccgtactatacttcacaacaatcctaatcctaataccaactatctccctaattgaaaacaaaatactcaaatgggcctgtccttgtagtataaactaatacaccagtcttgtaaaccggagatgaaaacctttttccaaggacaaatcagagaaaaagtctttaactccaccattagcacccaaagctaagattctaatttaaactattctctgttctttcatggggaagcagatttgggtaccacccaagtattgactcacccatcaacaaccgctatgtatttcgtacattactgccagccaccatgaatattgtacggtaccataaatacttgaccacctgtagtacataaaaacccaatccacatcaaaaccccctccccatgcttacaagcaagtacagcaatcaaccctcaactatcacacatcaactgcaactccaaagccacccctcacccactaggataccaacaaacctacccacccttaacagtacatagtacataaagccatttaccgtacatagcacattacagtcaaatcccttctcgtccccatggatgacccccctcagataggggtcccttgaccaccatcctccgtgaaatcaatatcccgcacaagagtgctactctcctcgctccgggcccataacacttgggggtagctaaagtgaactgtatccgacatctggttcctacttcagggtcataaagcctaaatagcccacacgttccccttaaataagacatcacgatg

SEQ ID NO: 111 - DNA, 16569 bp, Homo sapiens mitochondrial DNA
  insertion (303)..(304): 303.1INS C
gatcacaggtctatcaccctattaaccactcacgggagctctccatgcatttggtattttcgtctggggggtatgcacgcgatagcattgcgagacgctggagccggagcaccctatgtcgcagtatctgtctttgattcctgcctcatcctattatttatcgcacctacgttcaatattacaggcgaacatacttactaaagtgtgttaattaattaatgcttgtaggacataataataacaattgaatgtctgcacagccactttccacacagacatcataacaaaaaatttccaccaaacccccccctcccccgcttctggccacagcacttaaacacatctctgccaaaccccaaaaacaaagaaccctaacaccagcctaaccagatttcaaattttatcttttggcggtatgcacttttaacagtcaccccccaactaacacattattttcccctcccactcccatactactaatctcatcaatacaacccccgcccatcctacccagcacacacacaccgctgctaaccccataccccgaaccaaccaaaccccaaagacaccccccacagtttatgtagcttacctcctcaaagcaatacactgaaaatgtttagacgggctcacatcaccccataaacaaataggtttggtcctagcctttctattagctcttagtaagattacacatgcaagcatccccgttccagtgagttcaccctctaaatcaccacgatcaaaaggaacaagcatcaagcacgcagcaatgcagctcaaaacgcttagcctagccacacccccacgggaaacagcagtgattaacctttagcaataaacgaaagtttaactaagctatactaaccccagggttggtcaatttcgtgccagccaccgcggtcacacgattaacccaagtcaatagaagccggcgtaaagagtgttttagatcaccccctccccaataaagctaaaactcacctgagttgtaaaaaactccagttgacacaaaatagactacgaaagtggctttaacatatctgaacacacaatagctaagacccaaactgggattagataccccactatgcttagccctaaacctcaacagttaaatcaacaaaactgctcgccagaacactacgagccacagcttaaaactcaaaggacctggcggtgcttcatatccctctagaggagcctgttctgtaatcgataaaccccgatcaacctcaccacctcttgctcagcctatataccgccatcttcagcaaaccctgatgaaggctacaaagtaagcgcaagtacccacgtaaagacgttaggtcaaggtgtagcccatgaggtggcaagaaatgggctacattttctaccccagaaaactacgatagcccttatgaaacttaagggtcgaaggtggatttagcagtaaactaagagtagagtgcttagttgaacagggccctgaagcgcgtacacaccgcccgtcaccctcctcaagtatacttcaaaggacatttaactaaaacccctacgcatttatatagaggagacaagtcgtaacatggtaagtgtactggaaagtgcacttggacgaaccagagtgtagcttaacacaaagcacccaacttacacttaggagatttcaacttaacttgaccgctctgagctaaacctagccccaaacccactccaccttactaccagacaaccttagccaaaccatttacccaaataaagtataggcgatagaaattgaaacctggcgcaatagatatagtaccgcaagggaaagatgaaaaattataaccaagcataatatagcaaggactaacccctataccttctgcataatgaattaactagaaataactttgcaaggagagccaaagctaagacccccgaaaccagacgagctacctaagaacagctaaaagagcacacccgtctatgtagcaaaatagtgggaagatttataggtagaggcgacaaacctaccgagcctggtgatagctggttgtccaagatagaatcttagttcaactttaaatttgcccacagaaccctctaaatccccttgtaaatttaactgttagtccaaagaggaacagctctttggacactaggaaaaaaccttgtagagagagtaaaaaatttaacacccatagtaggcctaaaagcagccaccaattaagaaagcgttcaagctcaacacccactacctaaaaaatcccaaacatataactgaactcctcacacccaattggaccaatctatcaccctatagaagaactaatgttagtataagtaacatgaaaacattctcctccgcataagcctgcgtcagattaaaacactgaactgacaattaacagcccaatatctacaatcaaccaacaagtcattattaccctcactgtcaacccaacacaggcatgctcataaggaaaggttaaaaaaagtaaaaggaactcggcaaatcttaccccgcctgtttaccaaaaacatcacctctagcatcaccagtattagaggcaccgcctgcccagtgacacatgtttaacggccgcggtaccctaaccgtgcaaaggtagcataatcacttgttccttaaatagggacctgtatgaatggctccacgagggttcagctgtctcttacttttaaccagtgaaattgacctgcccgtgaagaggcgggcataacacagcaagacgagaagaccctatggagctttaatttattaatgcaaacagtacctaacaaacccacaggtcctaaactaccaaacctgcattaaaaatttcggttggggcgacctcggagcagaacccaacctccgagcagtacatgctaagacttcaccagtcaaagcgaactactatactcaattgatccaataacttgaccaacggaacaagttaccctagggataacagcgcaatcctattctagagtccatatcaacaatagggtttacgacctcgatgttggatcaggacatcccgatggtgcagccgctattaaaggttcgtttgttcaacgattaaagtcctacgtgatctgagttcagaccggagtaatccaggtcggtttctatctacttcaaattcctccctgtacgaaaggacaagagaaataaggcctacttcacaaagcgccttcccccgtaaatgatatcatctcaacttagtattatacccacacccacccaagaacagggtttgttaagatggcagagcccggtaatcgcataaaacttaaaactttacagtcagaggttcaattcctcttcttaacaacatacccatggccaacctcctactcctcattgtacccattctaatcgcaatggcattcctaatgcttaccgaacgaaaaattctaggctatatacaactacgcaaaggccccaacgttgtaggcccctacgggctactacaacccttcgctgacgccataaaactcttcaccaaagagcccctaaaacccgccacatctaccatcaccctctacatcaccgccccgaccttagctctcaccatcgctcttctactatgaacccccctccccatacccaaccccctggtcaacctcaacctaggcctcctatttattctagccacctctagcctagccgtttactcaatcctctgatcagggtgagcatcaaactcaaactacgccctgatcggcgcactgcgagcagtagcccaaacaatctcatatgaagtcaccctagccatcattctactatcaacattactaataagtggctcctttaacctctccacccttatcacaacacaagaacacctctgattactcctgccatcatgacccttggccataatatgatttatctccacactagcagagaccaaccgaacccccttcgaccttgccgaaggggagtccgaactagtctcaggcttcaacatcgaatacgccgcaggccccttcgccctattcttcatagccgaatacacaaacattattataataaacaccctcaccactacaatcttcctaggaacaacatatgacgcactctcccctgaactctacacaacatattttgtcaccaagaccctacttctaacctccctgttcttatgaattcgaacagcatacccccgattccgctacgaccaactcatacacctcctatgaaaaaacttcctaccactcaccctagcattacttatatgatatgtctccatacccattacaatctccagcattccccctcaaacctaagaaatatgtctgataaaagagttactttgatagagtaaataataggagcttaaacccccttatttctaggactatgagaatcgaacccatccctgagaatccaaaattctccgtgccacctatcacaccccatcctaaagtaaggtcagctaaataagctatcgggcccataccccgaaaatgttggttatacccttcccgtactaattaatcccctggcccaacccgtcatctactctaccatctttgcaggcacactcatcacagcgctaagctcgcactgattttttacctgagtaggcctagaaataaacatgctagcttttattccagttctaaccaaaaaaataaaccctcgttccacagaagctgccatcaagtatttcctcacgcaagcaaccgcatccataatccttctaatagctatcctcttcaacaatatactctccggacaatgaaccataaccaatactaccaatcaatactcatcattaataatcataatagctatagcaataaaactaggaatagccccctttcacttctgagtcccagaggttacccaaggcacccctctgacatccggcctgcttcttctcacatgacaaaaactagcccccatctcaatcatataccaaatctctccctcactaaacgtaagccttctcctcactctctcaatcttatccatcatagcaggcagttgaggtggattaaaccaaacccagctacgcaaaatcttagcatactcctcaattacccacataggatgaataatagcagttctaccgtacaaccctaacataaccattcttaatttaactatttatattatcctaactactaccgcattcctactactcaacttaaactccagcaccacgaccctactactatctcgcacctgaaacaagctaacatgactaacacccttaattccatccaccctcctctccctaggaggcctgcccccgctaaccggctttttgcccaaatgggccattatcgaagaattcacaaaaaacaatagcctcatcatccccaccatcatagccaccatcaccctccttaacctctacttctacctacgcctaatctactccacctcaatcacactactccccatatctaacaacgtaaaaataaaatgacagtttgaacatacaaaacccaccccattcctccccacactcatcgcccttaccacgctactcctacctatctccccttttatactaataatcttatagaaatttaggttaaatacagaccaagagccttcaaagccctcagtaagttgcaatacttaatttctgtaacagctaaggactgcaaaaccccactctgcatcaactgaacgcaaatcagccactttaattaagctaagcccttactagaccaatgggacttaaacccacaaacacttagttaacagctaagcaccctaatcaactggcttcaatctacttctcccgccgccgggaaaaaaggcgggagaagccccggcaggtttgaagctgcttcttcgaatttgcaattcaatatgaaaatcacctcggagctggtaaaaagaggcctaacccctgtctttagatttacagtccaatgcttcactcagccattttacctcacccccactgatgttcgccgaccgttgactattctctacaaaccacaaagacattggaacactatacctattattcggcgcatgagctggagtcctaggcacagctctaagcctccttattcgagccgagctgggccagccaggcaaccttctaggtaacgaccacatctacaacgttatcgtcacagcccatgcatttgtaataatcttcttcatagtaatacccatcataatcggaggctttggcaactgactagttcccctaataatcggtgcccccgatatggcgtttccccgcataaacaacataagcttctgactcttacctccctctctcctactcctgctcgcatctgctatagtggaggccggagcaggaacaggttgaacagtctaccctcccttagcagggaactactcccaccctggagcctccgtagacctaaccatcttctccttacacctagcaggtgtctcctctatcttaggggccatcaatttcatcacaacaattatcaatataaaaccccctgccataacccaataccaaacgcccctcttcgtctgatccgtcctaatcacagcagtcctacttctcctatctctcccagtcctagctgctggcatcactatactactaacagaccgcaacctcaacaccaccttcttcgaccccgccggaggaggagaccccattctataccaacacctattctgatttttcggtcaccctgaagtttatattcttatcctaccaggcttcggaataatctcccatattgtaacttactactccggaaaaaaagaaccatttggatacataggtatggtctgagctatgatatcaattggcttcctagggtttatcgtgtgagcacaccatatatttacagtaggaatagacgtagacacacgagcatatttcacctccgctaccataatcatcgctatccccaccggcgtcaaagtatttagctgactcgccacactccacggaagcaatatgaaatgatctgctgcagtgctctgagccctaggattcatctttcttttcaccgtaggtggcctgactggcattgtattagcaaactcatcactagacatcgtactacacgacacgtactacgttgtagcccacttccactatgtcctatcaataggagctgtatttgccatcataggaggcttcattcactgatttcccctattctcaggctacaccctagaccaaacctacgccaaaatccatttcactatcatattcatcggcgtaaatctaactttcttcccacaacactttctcggcctatccggaatgccccgacgttactcggactaccccgatgcatacaccacatgaaacatcctatcatctgtaggctcattcatttctctaacagcagtaatattaataattttcatgatttgagaagccttcgcttcgaagcgaaaagtcctaatagtagaagaaccctccataaacctggagtgactatatggatgccccccaccctaccacacattcgaagaacccgtatacataaaatctagacaaaaaaggaaggaatcgaaccccccaaagctggtttcaagccaaccccatggcctccatgactttttcaaaaaggtattagaaaaaccatttcataactttgtcaaagttaaattataggctaaatcctatatatcttaatggcacatgcagcgcaagtaggtctacaagacgctacttcccctatcatagaagagcttatcacctttcatgatcacgccctcataatcattttccttatctgcttcctagtcctgtatgcccttttcctaacactcacaacaaaactaactaatactaacatctcagacgctcaggaaatagaaaccgtctgaactatcctgcccgccatcatcctagtcctcatcgccctcccatccctacgcatcctttacataacagacgaggtcaacgatccctcccttaccatcaaatcaattggccaccaatggtactgaacctacgagtacaccgactacggcggactaatcttcaactcctacatacttcccccattattcctagaaccaggcgacctgcgactccttgacgttgacaatcgagtagtactcccgattgaagcccccattcgtataataattacatcacaagacgtcttgcactcatgagctgtccccacattaggcttaaaaacagatgcaattcccggacgtctaaaccaaaccactttcaccgctacacgaccgggggtatactacggtcaatgctctgaaatctgtggagcaaaccacagtttcatgcccatcgtcctagaattaattcccctaaaaatctttgaaatagggcccgtatttaccctatagcaccccctctaccccctctagagcccactgtaaagctaacttagcattaaccttttaagttaaagattaagagaaccaacacctctttacagtgaaatgccccaactaaatactaccgtatggcccaccataattacccccatactccttacactattcctcatcacccaactaaaaatattaaacacaaactaccacctacctccctcaccaaagcccataaaaataaaaaattataacaaaccctgagaaccaaaatgaacgaaaatctgttcgcttcattcattgcccccacaatcctaggcctacccgccgcagtactgatcattctatttccccctctattgatccccacctccaaatatctcatcaacaaccgactaatcaccacccaacaatgactaatcaaactaacctcaaaacaaatgataaccatacacaacactaaaggacgaacctgatctcttatactagtatccttaatcatttttattgccacaactaacctcctcggactcctgcctcactcatttacaccaaccacccaactatctataaacctagccatggccatccccttatgagcgggcacagtgattataggctttcgctctaagattaaaaatgccctagcccacttcttaccacaaggcacacctacaccccttatccccatactagttattatcgaaaccatcagcctactcattcaaccaatagccctggccgtacgcctaaccgctaacattactgcaggccacctactcatgcacctaattggaagcgccaccctagcaatatcaaccattaaccttccctctacacttatcatcttcacaattctaattctactgactatcctagaaatcgctgtcgccttaatccaagcctacgttttcacacttctagtaagcctctacctgcacgacaacacataatgacccaccaatcacatgcctatcatatagtaaaacccagcccatgacccctaacaggggccctctcagccctcctaatgacctccggcctagccatgtgatttcacttccactccataacgctcctcatactaggcctactaaccaacacactaaccatataccaatgatggcgcgatgtaacacgagaaagcacataccaaggccaccacacaccacctgtccaaaaaggccttcgatacgggataatcctatttattacctcagaagtttttttcttcgcaggatttttctgagccttttaccactccagcctagcccctaccccccaattaggagggcactggcccccaacaggcatcaccccgctaaatcccctagaagtcccactcctaaacacatccgtattactcgcatcaggagtatcaatcacctgagctcaccatagtctaatagaaaacaaccgaaaccaaataattcaagcactgcttattacaattttactgggtctctattttaccctcctacaagcctcagagtacttcgagtctcccttcaccatttccgacggcatctacggctcaacattttttgtagccacaggcttccacggacttcacgtcattattggctcaactttcctcactatctgcttcatccgccaactaatatttcactttacatccaaacatcactttggcttcgaagccgccgcctgatactggcattttgtagatgtggtttgactatttctgtatgtctccatctattgatgagggtcttactcttttagtataaatagtaccgttaacttccaattaactagttttgacaacattcaaaaaagagtaataaacttcgccttaattttaataatcaacaccctcctagccttactactaataattattacattttgactaccacaactcaacggctacatagaaaaatccaccccttacgagtgcggcttcgaccctatatcccccgcccgcgtccctttctccataaaattcttcttagtagctattaccttcttattatttgatctagaaattgccctccttttacccctaccatgagccctacaaacaactaacctgccactaatagttatgtcatccctcttattaatcatcatcctagccctaagtctggcctatgagtgactacaaaaaggattagactgaaccgaattggtatatagtttaaacaaaacgaatgatttcgactcattaaattatgataatcatatttaccaaatgcccctcatttacataaatattatactagcatttaccatctcacttctaggaatactagtatatcgctcacacctcatatcctccctactatgcctagaaggaataatactatcgctgttcattatagctactctcataaccctcaacacccactccctcttagccaatattgtgcctattgccatactagtctttgccgcctgcgaagcagcggtgggcctagccctactagtctcaatctccaacacatatggcctagactacgtacataacctaaacctactccaatgctaaaactaatcgtcccaacaattatattactaccactgacatgactttccaaaaaacacataatttgaatcaacacaaccacccacagcctaattattagcatcatccctctactattttttaaccaaatcaacaacaacctatttagctgttccccaaccttttcctccgaccccctaacaacccccctcctaatactaactacctgactcctacccctcacaatcatggcaagccaacgccacttatccagtgaaccactatcacgaaaaaaactctacctctctatactaatctccctacaaatctccttaattataacattcacagccacagaactaatcatattttatatcttcttcgaaaccacacttatccccaccttggctatcatcacccgatgaggcaaccagccagaacgcctgaacgcaggcacatacttcctattctacaccctagtaggctcccttcccctactcatcgcactaatttacactcacaacaccctaggctcactaaacattctactactcactctcactgcccaagaactatcaaactcctgagccaacaacttaatatgactagcttacacaatagcttttatagtaaagatacctctttacggactccacttatgactccctaaagcccatgtcgaagcccccatcgctgggtcaatagtacttgccgcagtactcttaaaactaggcggctatggtataatacgcctcacactcattctcaaccccctgacaaaacacatagcctaccccttccttgtactatccctatgaggcataattataacaagctccatctgcctacgacaaacagacctaaaatcgctcattgcatactcttcaatcagccacatagccctcgtagtaacagccattctcatccaaaccccctgaagcttcaccggcgcagtcattctcataatcgcccacgggcttacatcctcattactattctgcctagcaaactcaaactacgaacgcactcacagtcgcatcataatcctctctcaaggacttcaaactctactcccactaatagctttttgatgacttctagcaagcctcgctaacctcgccttaccccccactattaacctactgggagaactctctgtgctagtaaccacgttctcctgatcaaatatcactctcctacttacaggactcaacatactagtcacagccctatactccctctacatatttaccacaacacaatggggctcactcacccaccacattaacaacataaaaccctcattcacacgagaaaacaccctcatgttcatacacctatcccccattctcctcctatccctcaaccccgacatcattaccgggttttcctcttgtaaatatagtttaaccaaaacatcagattgtgaatctgacaacagaggcttacgaccccttatttaccgagaaagctcacaagaactgctaactcatgcccccatgtctaacaacatggctttctcaacttttaaaggataacagctatccattggtcttaggccccaaaaattttggtgcaactccaaataaaagtaataaccatgcacactactataaccaccctaaccctgacttccctaattccccccatccttaccaccctcgttaaccctaacaaaaaaaactcatacccccattatgtaaaatccattgtcgcatccacctttattatcagtctcttccccacaacaatattcatgtgcctagaccaagaagttattatctcgaactgacactgagccacaacccaaacaacccagctctccctaagcttcaaactagactacttctccataatattcatccctgtagcattgttcgttacatggtccatcatagaattctcactgtgatatataaactcagacccaaacattaatcagttcttcaaatatctactcatcttcctaattaccatactaatcttagttaccgctaacaacctattccaactgttcatcggctgagagggcgtaggaattatatccttcttgctcatcagttgatgatacgcccgagcagatgccaacacagcagccattcaagcaatcctatacaaccgtatcggcgatatcggtttcatcctcgccttagcatgatttatcctacactccaactcatgagacccacaacaaatagcccttctaaacgctaatccaagcctcaccccactactaggcctcctcctagcagcagcaggcaaatcagcccaattaggtctccacccctgactcccctcagccatagaaggccccaccccagtctcagccctactccactcaagcactatagttgtagcaggaatcttcttactcatccgcttccaccccctagcagaaaatagcccactaatccaaactctaacactatgcttaggcgctatcaccactctgttcgcagcagtctgcgcccttacacaaaatgacatcaaaaaaatcgtagccttctccacttcaagtcaactaggactcataatagttacaatcggcatcaaccaaccacacctagcattcctgcacatctgtacccacgccttcttcaaagccatactatttatgtgctccgggtccatcatccacaaccttaacaatgaacaagatattcgaaaaataggaggactactcaaaaccatacctctcacttcaacctccctcaccattggcagcctagcattagcaggaatacctttcctcacaggtttctactccaaagaccacatcatcgaaaccgcaaacatatcatacacaaacgcctgagccctatctattactctcatcgctacctccctgacaagcgcctatagcactcgaataattcttctcaccctaacaggtcaacctcgcttccccacccttactaacattaacgaaaataaccccaccctactaaaccccattaaacgcctggcagccggaagcctattcgcaggatttctcattactaacaacatttcccccgcatcccccttccaaacaacaatccccctctacctaaaactcacagccctcgctgtcactttcctaggacttctaacagccctagacctcaactacctaaccaacaaacttaaaataaaatccccactatgcacattttatttctccaacatactcggattctaccctagcatcacacaccgcacaatcccctatctaggccttcttacgagccaaaacctgcccctactcctcctagacctaacctgactagaaaagctattacctaaaacaatttcacagcaccaaatctccacctccatcatcacctcaacccaaaaaggcataattaaactttacttcctctctttcttcttcccactcatcctaaccctactcctaatcacataacctattcccccgagcaatctcaattacaatatatacaccaacaaacaatgttcaaccagtaactactactaatcaacgcccataatcatacaaagcccccgcaccaataggatcctcccgaatcaaccctgacccctctccttcataaattattcagcttcctacactattaaagtttaccacaaccaccaccccatcatactctttcacccacagcaccaatcctacctccatcgctaaccccactaaaacactcaccaagacctcaacccctgacccccatgcctcaggatactcctcaatagccatcgctgtagtatatccaaagacaaccatcattccccctaaataaattaaaaaaactattaaacccatataacctcccccaaaattcagaataataacacacccgaccacaccgctaacaatcaatactaaacccccataaataggagaaggcttagaagaaaaccccacaaaccccattactaaacccacactcaacagaaacaaagcatacatcattattctcgcacggactacaaccacgaccaatgatatgaaaaaccatcgttgtatttcaactacaagaacaccaatgaccccaatacgcaaaactaaccccctaataaaattaattaaccactcattcatcgacctccccaccccatccaacatctccgcatgatgaaacttcggctcactccttggcgcctgcctgatcctccaaatcaccacaggactattcctagccatgcactactcaccagacgcctcaaccgccttttcatcaatcgcccacatcactcgagacgtaaattatggctgaatcatccgctaccttcacgccaatggcgcctcaatattctttatctgcctcttcctacacatcgggcgaggcctatattacggatcatttctctactcagaaacctgaaacatcggcattatcctcctgcttgcaactatagcaacagccttcataggctatgtcctcccgtgaggccaaatatcattctgaggggccacagtaattacaaacttactatccgccatcccatacattgggacagacctagttcaatgaatctgaggaggctactcagtagacagtcccaccctcacacgattctttacctttcacttcatcttgcccttcattattgcagccctagcaacactccacctcctattcttgcacgaaacgggatcaaacaaccccctaggaatcacctcccattccgataaaatcaccttccacccttactacacaatcaaagacgccctcggcttacttctcttccttctctccttaatgacattaacactattctcaccagacctcctaggcgacccagacaattataccctagccaaccccttaaacacccctccccacatcaagcccgaatgatatttcctattcgcctacacaattctccgatccgtccctaacaaactaggaggcgtccttgccctattactatccatcctcatcctagcaataatccccatcctccatatatccaaacaacaaagcataatatttcgcccactaagccaatcactttattgactcctagccgcagacctcctcattctaacctgaatcggaggacaaccagtaagctacccttttaccatcattggacaagtagcatccgtactatacttcacaacaatcctaatcctaataccaactatctccctaattgaaaacaaaatactcaaatgggcctgtccttgtagtataaactaatacaccagtcttgtaaaccggagatgaaaacctttttccaaggacaaatcagagaaaaagtctttaactccaccattagcacccaaagctaagattctaatttaaactattctctgttctttcatggggaagcagatttgggtaccacccaagtattgactcacccatcaacaaccgctatgtatttcgtacattactgccagccaccatgaatattgtacggtaccataaatacttgaccacctgtagtacataaaaacccaatccacatcaaaaccccctccccatgcttacaagcaagtacagcaatcaaccctcaactatcacacatcaactgcaactccaaagccacccctcacccactaggataccaacaaacctacccacccttaacagtacatagtacataaagccatttaccgtacatagcacattacagtcaaatcccttctcgtccccatggatgacccccctcagataggggtcccttgaccaccatcctccgtgaaatcaatatcccgcacaagagtgctactctcctcgctccgggcccataacacttgggggtagctaaagtgaactgtatccgacatctggttcctacttcagggtcataaagcctaaatagcccacacgttccccttaaataagacatcacgatg

SEQ ID NO: 112 - DNA, 16570 bp, Homo sapiens mitochondrial DNA
  insertion (303)..(304): 303.2INS CC
gatcacaggtctatcaccctattaaccactcacgggagctctccatgcatttggtattttcgtctggggggtatgcacgcgatagcattgcgagacgctggagccggagcaccctatgtcgcagtatctgtctttgattcctgcctcatcctattatttatcgcacctacgttcaatattacaggcgaacatacttactaaagtgtgttaattaattaatgcttgtaggacataataataacaattgaatgtctgcacagccactttccacacagacatcataacaaaaaatttccaccaaaccccccccctcccccgcttctggccacagcacttaaacacatctctgccaaaccccaaaaacaaagaaccctaacaccagcctaaccagatttcaaattttatcttttggcggtatgcacttttaacagtcaccccccaactaacacattattttcccctcccactcccatactactaatctcatcaatacaacccccgcccatcctacccagcacacacacaccgctgctaaccccataccccgaaccaaccaaaccccaaagacaccccccacagtttatgtagcttacctcctcaaagcaatacactgaaaatgtttagacgggctcacatcaccccataaacaaataggtttggtcctagcctttctattagctcttagtaagattacacatgcaagcatccccgttccagtgagttcaccctctaaatcaccacgatcaaaaggaacaagcatcaagcacgcagcaatgcagctcaaaacgcttagcctagccacacccccacgggaaacagcagtgattaacctttagcaataaacgaaagtttaactaagctatactaaccccagggttggtcaatttcgtgccagccaccgcggtcacacgattaacccaagtcaatagaagccggcgtaaagagtgttttagatcaccccctccccaataaagctaaaactcacctgagttgtaaaaaactccagttgacacaaaatagactacgaaagtggctttaacatatctgaacacacaatagctaagacccaaactgggattagataccccactatgcttagccctaaacctcaacagttaaatcaacaaaactgctcgccagaacactacgagccacagcttaaaactcaaaggacctggcggtgcttcatatccctctagaggagcctgttctgtaatcgataaaccccgatcaacctcaccacctcttgctcagcctatataccgccatcttcagcaaaccctgatgaaggctacaaagtaagcgcaagtacccacgtaaagacgttaggtcaaggtgtagcccatgaggtggcaagaaatgggctacattttctaccccagaaaactacgatagcccttatgaaacttaagggtcgaaggtggatttagcagtaaactaagagtagagtgcttagttgaacagggccctgaagcgcgtacacaccgcccgtcaccctcctcaagtatacttcaaaggacatttaactaaaacccctacgcatttatatagaggagacaagtcgtaacatggtaagtgtactggaaagtgcacttggacgaaccagagtgtagcttaacacaaagcacccaacttacacttaggagatttcaacttaacttgaccgctctgagctaaacctagccccaaacccactccaccttactaccagacaaccttagccaaaccatttacccaaataaagtataggcgatagaaattgaaacctggcgcaatagatatagtaccgcaagggaaagatgaaaaattataaccaagcataatatagcaaggactaacccctataccttctgcataatgaattaactagaaataactttgcaaggagagccaaagctaagacccccgaaaccagacgagctacctaagaacagctaaaagagcacacccgtctatgtagcaaaatagtgggaagatttataggtagaggcgacaaacctaccgagcctggtgatagctggttgtccaagatagaatcttagttcaactttaaatttgcccacagaaccctctaaatccccttgtaaatttaactgttagtccaaagaggaacagctctttggacactaggaaaaaaccttgtagagagagtaaaaaatttaacacccatagtaggcctaaaagcagccaccaattaagaaagcgttcaagctcaacacccactacctaaaaaatcccaaacatataactgaactcctcacacccaattggaccaatctatcaccctatagaagaactaatgttagtataagtaacatgaaaacattctcctccgcataagcctgcgtcagattaaaacactgaactgacaattaacagcccaatatctacaatcaaccaacaagtcattattaccctcactgtcaacccaacacaggcatgctcataaggaaaggttaaaaaaagtaaaaggaactcggcaaatcttaccccgcctgtttaccaaaaacatcacctctagcatcaccagtattagaggcaccgcctgcccagtgacacatgtttaacggccgcggtaccctaaccgtgcaaaggtagcataatcacttgttccttaaatagggacctgtatgaatggctccacgagggttcagctgtctcttacttttaaccagtgaaattgacctgcccgtgaagaggcgggcataacacagcaagacgagaagaccctatggagctttaatttattaatgcaaacagtacctaacaaacccacaggtcctaaactaccaaacctgcattaaaaatttcggttggggcgacctcggagcagaacccaacctccgagcagtacatgctaagacttcaccagtcaaagcgaactactatactcaattgatccaataacttgaccaacggaacaagttaccctagggataacagcgcaatcctattctagagtccatatcaacaatagggtttacgacctcgatgttggatcaggacatcccgatggtgcagccgctattaaaggttcgtttgttcaacgattaaagtcctacgtgatctgagttcagaccggagtaatccaggtcggtttctatctacttcaaattcctccctgtacgaaaggacaagagaaataaggcctacttcacaaagcgccttcccccgtaaatgatatcatctcaacttagtattatacccacacccacccaagaacagggtttgttaagatggcagagcccggtaatcgcataaaacttaaaactttacagtcagaggttcaattcctcttcttaacaacatacccatggccaacctcctactcctcattgtacccattctaatcgcaatggcattcctaatgcttaccgaacgaaaaattctaggctatatacaactacgcaaaggccccaacgttgtaggcccctacgggctactacaacccttcgctgacgccataaaactcttcaccaaagagcccctaaaacccgccacatctaccatcaccctctacatcaccgccccgaccttagctctcaccatcgctcttctactatgaacccccctccccatacccaaccccctggtcaacctcaacctaggcctcctatttattctagccacctctagcctagccgtttactcaatcctctgatcagggtgagcatcaaactcaaactacgccctgatcggcgcactgcgagcagtagcccaaacaatctcatatgaagtcaccctagccatcattctactatcaacattactaataagtggctcctttaacctctccacccttatcacaacacaagaacacctctgattactcctgccatcatgacccttggccataatatgatttatctccacactagcagagaccaaccgaacccccttcgaccttgccgaaggggagtccgaactagtctcaggcttcaacatcgaatacgccgcaggccccttcgccctattcttcatagccgaatacacaaacattattataataaacaccctcaccactacaatcttcctaggaacaacatatgacgcactctcccctgaactctacacaacatattttgtcaccaagaccctacttctaacctccctgttcttatgaattcgaacagcatacccccgattccgctacgaccaactcatacacctcctatgaaaaaacttcctaccactcaccctagcattacttatatgatatgtctccatacccattacaatctccagcattccccctcaaacctaagaaatatgtctgataaaagagttactttgatagagtaaataataggagcttaaacccccttatttctaggactatgagaatcgaacccatccctgagaatccaaaattctccgtgccacctatcacaccccatcctaaagtaaggtcagctaaataagctatcgggcccataccccgaaaatgttggttatacccttcccgtactaattaatcccctggcccaacccgtcatctactctaccatctttgcaggcacactcatcacagcgctaagctcgcactgattttttacctgagtaggcctagaaataaacatgctagcttttattccagttctaaccaaaaaaataaaccctcgttccacagaagctgccatcaagtatttcctcacgcaagcaaccgcatccataatccttctaatagctatcctcttcaacaatatactctccggacaatgaaccataaccaatactaccaatcaatactcatcattaataatcataatagctatagcaataaaactaggaatagccccctttcacttctgagtcccagaggttacccaaggcacccctctgacatccggcctgcttcttctcacatgacaaaaactagcccccatctcaatcatataccaaatctctccctcactaaacgtaagccttctcctcactctctcaatcttatccatcatagcaggcagttgaggtggattaaaccaaacccagctacgcaaaatcttagcatactcctcaattacccacataggatgaataatagcagttctaccgtacaaccctaacataaccattcttaatttaactatttatattatcctaactactaccgcattcctactactcaacttaaactccagcaccacgaccctactactatctcgcacctgaaacaagctaacatgactaacacccttaattccatccaccctcctctccctaggaggcctgcccccgctaaccggctttttgcccaaatgggccattatcgaagaattcacaaaaaacaatagcctcatcatccccaccatcatagccaccatcaccctccttaacctctacttctacctacgcctaatctactccacctcaatcacactactccccatatctaacaacgtaaaaataaaatgacagtttgaacatacaaaacccaccccattcctccccacactcatcgcccttaccacgctactcctacctatctccccttttatactaataatcttatagaaatttaggttaaatacagaccaagagccttcaaagccctcagtaagttgcaatacttaatttctgtaacagctaaggactgcaaaaccccactctgcatcaactgaacgcaaatcagccactttaattaagctaagcccttactagaccaatgggacttaaacccacaaacacttagttaacagctaagcaccctaatcaactggcttcaatctacttctcccgccgccgggaaaaaaggcgggagaagccccggcaggtttgaagctgcttcttcgaatttgcaattcaatatgaaaatcacctcggagctggtaaaaagaggcctaacccctgtctttagatttacagtccaatgcttcactcagccattttacctcacccccactgatgttcgccgaccgttgactattctctacaaaccacaaagacattggaacactatacctattattcggcgcatgagctggagtcctaggcacagctctaagcctccttattcgagccgagctgggccagccaggcaaccttctaggtaacgaccacatctacaacgttatcgtcacagcccatgcatttgtaataatcttcttcatagtaatacccatcataatcggaggctttggcaactgactagttcccctaataatcggtgcccccgatatggcgtttccccgcataaacaacataagcttctgactcttacctccctctctcctactcctgctcgcatctgctatagtggaggccggagcaggaacaggttgaacagtctaccctcccttagcagggaactactcccaccctggagcctccgtagacctaaccatcttctccttacacctagcaggtgtctcctctatcttaggggccatcaatttcatcacaacaattatcaatataaaaccccctgccataacccaataccaaacgcccctcttcgtctgatccgtcctaatcacagcagtcctacttctcctatctctcccagtcctagctgctggcatcactatactactaacagaccgcaacctcaacaccaccttcttcgaccccgccggaggaggagaccccattctataccaacacctattctgatttttcggtcaccctgaagtttatattcttatcctaccaggcttcggaataatctcccatattgtaacttactactccggaaaaaaagaaccatttggatacataggtatggtctgagctatgatatcaattggcttcctagggtttatcgtgtgagcacaccatatatttacagtaggaatagacgtagacacacgagcatatttcacctccgctaccataatcatcgctatccccaccggcgtcaaagtatttagctgactcgccacactccacggaagcaatatgaaatgatctgctgcagtgctctgagccctaggattcatctttcttttcaccgtaggtggcctgactggcattgtattagcaaactcatcactagacatcgtactacacgacacgtactacgttgtagcccacttccactatgtcctatcaataggagctgtatttgccatcataggaggcttcattcactgatttcccctattctcaggctacaccctagaccaaacctacgccaaaatccatttcactatcatattcatcggcgtaaatctaactttcttcccacaacactttctcggcctatccggaatgccccgacgttactcggactaccccgatgcatacaccacatgaaacatcctatcatctgtaggctcattcatttctctaacagcagtaatattaataattttcatgatttgagaagccttcgcttcgaagcgaaaagtcctaatagtagaagaaccctccataaacctggagtgactatatggatgccccccaccctaccacacattcgaagaacccgtatacataaaatctagacaaaaaaggaaggaatcgaaccccccaaagctggtttcaagccaaccccatggcctccatgactttttcaaaaaggtattagaaaaaccatttcataactttgtcaaagttaaattataggctaaatcctatatatcttaatggcacatgcagcgcaagtaggtctacaagacgctacttcccctatcatagaagagcttatcacctttcatgatcacgccctcataatcattttccttatctgcttcctagtcctgtatgcccttttcctaacactcacaacaaaactaactaatactaacatctcagacgctcaggaaatagaaaccgtctgaactatcctgcccgccatcatcctagtcctcatcgccctcccatccctacgcatcctttacataacagacgaggtcaacgatccctcccttaccatcaaatcaattggccaccaatggtactgaacctacgagtacaccgactacggcggactaatcttcaactcctacatacttcccccattattcctagaaccaggcgacctgcgactccttgacgttgacaatcgagtagtactcccgattgaagcccccattcgtataataattacatcacaagacgtcttgcactcatgagctgtccccacattaggcttaaaaacagatgcaattcccggacgtctaaaccaaaccactttcaccgctacacgaccgggggtatactacggtcaatgctctgaaatctgtggagcaaaccacagtttcatgcccatcgtcctagaattaattcccctaaaaatctttgaaatagggcccgtatttaccctatagcaccccctctaccccctctagagcccactgtaaagctaacttagcattaaccttttaagttaaagattaagagaaccaacacctctttacagtgaaatgccccaactaaatactaccgtatggcccaccataattacccccatactccttacactattcctcatcacccaactaaaaatattaaacacaaactaccacctacctccctcaccaaagcccataaaaataaaaaattataacaaaccctgagaaccaaaatgaacgaaaatctgttcgcttcattcattgcccccacaatcctaggcctacccgccgcagtactgatcattctatttccccctctattgatccccacctccaaatatctcatcaacaaccgactaatcaccacccaacaatgactaatcaaactaacctcaaaacaaatgataaccatacacaacactaaaggacgaacctgatctcttatactagtatccttaatcatttttattgccacaactaacctcctcggactcctgcctcactcatttacaccaaccacccaactatctataaacctagccatggccatccccttatgagcgggcacagtgattataggctttcgctctaagattaaaaatgccctagcccacttcttaccacaaggcacacctacaccccttatccccatactagttattatcgaaaccatcagcctactcattcaaccaatagccctggccgtacgcctaaccgctaacattactgcaggccacctactcatgcacctaattggaagcgccaccctagcaatatcaaccattaaccttccctctacacttatcatcttcacaattctaattctactgactatcctagaaatcgctgtcgccttaatccaagcctacgttttcacacttctagtaagcctctacctgcacgacaacacataatgacccaccaatcacatgcctatcatatagtaaaacccagcccatgacccctaacaggggccctctcagccctcctaatgacctccggcctagccatgtgatttcacttccactccataacgctcctcatactaggcctactaaccaacacactaaccatataccaatgatggcgcgatgtaacacgagaaagcacataccaaggccaccacacaccacctgtccaaaaaggccttcgatacgggataatcctatttattacctcagaagtttttttcttcgcaggatttttctgagccttttaccactccagcctagcccctaccccccaattaggagggcactggcccccaacaggcatcaccccgctaaatcccctagaagtcccactcctaaacacatccgtattactcgcatcaggagtatcaatcacctgagctcaccatagtctaatagaaaacaaccgaaaccaaataattcaagcactgcttattacaattttactgggtctctattttaccctcctacaagcctcagagtacttcgagtctcccttcaccatttccgacggcatctacggctcaacattttttgtagccacaggcttccacggacttcacgtcattattggctcaactttcctcactatctgcttcatccgccaactaatatttcactttacatccaaacatcactttggcttcgaagccgccgcctgatactggcattttgtagatgtggtttgactatttctgtatgtctccatctattgatgagggtcttactcttttagtataaatagtaccgttaacttccaattaactagttttgacaacattcaaaaaagagtaataaacttcgccttaattttaataatcaacaccctcctagccttactactaataattattacattttgactaccacaactcaacggctacatagaaaaatccaccccttacgagtgcggcttcgaccctatatcccccgcccgcgtccctttctccataaaattcttcttagtagctattaccttcttattatttgatctagaaattgccctccttttacccctaccatgagccctacaaacaactaacctgccactaatagttatgtcatccctcttattaatcatcatcctagccctaagtctggcctatgagtgactacaaaaaggattagactgaaccgaattggtatatagtttaaacaaaacgaatgatttcgactcattaaattatgataatcatatttaccaaatgcccctcatttacataaatattatactagcatttaccatctcacttctaggaatactagtatatcgctcacacctcatatcctccctactatgcctagaaggaataatactatcgctgttcattatagctactctcataaccctcaacacccactccctcttagccaatattgtgcctattgccatactagtctttgccgcctgcgaagcagcggtgggcctagccctactagtctcaatctccaacacatatggcctagactacgtacataacctaaacctactccaatgctaaaactaatcgtcccaacaattatattactaccactgacatgactttccaaaaaacacataatttgaatcaacacaaccacccacagcctaattattagcatcatccctctactattttttaaccaaatcaacaacaacctatttagctgttccccaaccttttcctccgaccccctaacaacccccctcctaatactaactacctgactcctacccctcacaatcatggcaagccaacgccacttatccagtgaaccactatcacgaaaaaaactctacctctctatactaatctccctacaaatctccttaattataacattcacagccacagaactaatcatattttatatcttcttcgaaaccacacttatccccaccttggctatcatcacccgatgaggcaaccagccagaacgcctgaacgcaggcacatacttcctattctacaccctagtaggctcccttcccctactcatcgcactaatttacactcacaacaccctaggctcactaaacattctactactcactctcactgcccaagaactatcaaactcctgagccaacaacttaatatgactagcttacacaatagcttttatagtaaagatacctctttacggactccacttatgactccctaaagcccatgtcgaagcccccatcgctgggtcaatagtacttgccgcagtactcttaaaactaggcggctatggtataatacgcctcacactcattctcaaccccctgacaaaacacatagcctaccccttccttgtactatccctatgaggcataattataacaagctccatctgcctacgacaaacagacctaaaatcgctcattgcatactcttcaatcagccacatagccctcgtagtaacagccattctcatccaaaccccctgaagcttcaccggcgcagtcattctcataatcgcccacgggcttacatcctcattactattctgcctagcaaactcaaactacgaacgcactcacagtcgcatcataatcctctctcaaggacttcaaactctactcccactaatagctttttgatgacttctagcaagcctcgctaacctcgccttaccccccactattaacctactgggagaactctctgtgctagtaaccacgttctcctgatcaaatatcactctcctacttacaggactcaacatactagtcacagccctatactccctctacatatttaccacaacacaatggggctcactcacccaccacattaacaacataaaaccctcattcacacgagaaaacaccctcatgttcatacacctatcccccattctcctcctatccctcaaccccgacatcattaccgggttttcctcttgtaaatatagtttaaccaaaacatcagattgtgaatctgacaacagaggcttacgaccccttatttaccgagaaagctcacaagaactgctaactcatgcccccatgtctaacaacatggctttctcaacttttaaaggataacagctatccattggtcttaggccccaaaaattttggtgcaactccaaataaaagtaataaccatgcacactactataaccaccctaaccctgacttccctaattccccccatccttaccaccctcgttaaccctaacaaaaaaaactcatacccccattatgtaaaatccattgtcgcatccacctttattatcagtctcttccccacaacaatattcatgtgcctagaccaagaagttattatctcgaactgacactgagccacaacccaaacaacccagctctccctaagcttcaaactagactacttctccataatattcatccctgtagcattgttcgttacatggtccatcatagaattctcactgtgatatataaactcagacccaaacattaatcagttcttcaaatatctactcatcttcctaattaccatactaatcttagttaccgctaacaacctattccaactgttcatcggctgagagggcgtaggaattatatccttcttgctcatcagttgatgatacgcccgagcagatgccaacacagcagccattcaagcaatcctatacaaccgtatcggcgatatcggtttcatcctcgccttagcatgatttatcctacactccaactcatgagacccacaacaaatagcccttctaaacgctaatccaagcctcaccccactactaggcctcctcctagcagcagcaggcaaatcagcccaattaggtctccacccctgactcccctcagccatagaaggccccaccccagtctcagccctactccactcaagcactatagttgtagcaggaatcttcttactcatccgcttccaccccctagcagaaaatagcccactaatccaaactctaacactatgcttaggcgctatcaccactctgttcgcagcagtctgcgcccttacacaaaatgacatcaaaaaaatcgtagccttctccacttcaagtcaactaggactcataatagttacaatcggcatcaaccaaccacacctagcattcctgcacatctgtacccacgccttcttcaaagccatactatttatgtgctccgggtccatcatccacaaccttaacaatgaacaagatattcgaaaaataggaggactactcaaaaccatacctctcacttcaacctccctcaccattggcagcctagcattagcaggaatacctttcctcacaggtttctactccaaagaccacatcatcgaaaccgcaaacatatcatacacaaacgcctgagccctatctattactctcatcgctacctccctgacaagcgcctatagcactcgaataattcttctcaccctaacaggtcaacctcgcttccccacccttactaacattaacgaaaataaccccaccctactaaaccccattaaacgcctggcagccggaagcctattcgcaggatttctcattactaacaacatttcccccgcatcccccttccaaacaacaatccccctctacctaaaactcacagccctcgctgtcactttcctaggacttctaacagccctagacctcaactacctaaccaacaaacttaaaataaaatccccactatgcacattttatttctccaacatactcggattctaccctagcatcacacaccgcacaatcccctatctaggccttcttacgagccaaaacctgcccctactcctcctagacctaacctgactagaaaagctattacctaaaacaatttcacagcaccaaatctccacctccatcatcacctcaacccaaaaaggcataattaaactttacttcctctctttcttcttcccactcatcctaaccctactcctaatcacataacctattcccccgagcaatctcaattacaatatatacaccaacaaacaatgttcaaccagtaactactactaatcaacgcccataatcatacaaagcccccgcaccaataggatcctcccgaatcaaccctgacccctctccttcataaattattcagcttcctacactattaaagtttaccacaaccaccaccccatcatactctttcacccacagcaccaatcctacctccatcgctaaccccactaaaacactcaccaagacctcaacccctgacccccatgcctcaggatactcctcaatagccatcgctgtagtatatccaaagacaaccatcattccccctaaataaattaaaaaaactattaaacccatataacctcccccaaaattcagaataataacacacccgaccacaccgctaacaatcaatactaaacccccataaataggagaaggcttagaagaaaaccccacaaaccccattactaaacccacactcaacagaaacaaagcatacatcattattctcgcacggactacaaccacgaccaatgatatgaaaaaccatcgttgtatttcaactacaagaacaccaatgaccccaatacgcaaaactaaccccctaataaaattaattaaccactcattcatcgacctccccaccccatccaacatctccgcatgatgaaacttcggctcactccttggcgcctgcctgatcctccaaatcaccacaggactattcctagccatgcactactcaccagacgcctcaaccgccttttcatcaatcgcccacatcactcgagacgtaaattatggctgaatcatccgctaccttcacgccaatggcgcctcaatattctttatctgcctcttcctacacatcgggcgaggcctatattacggatcatttctctactcagaaacctgaaacatcggcattatcctcctgcttgcaactatagcaacagccttcataggctatgtcctcccgtgaggccaaatatcattctgaggggccacagtaattacaaacttactatccgccatcccatacattgggacagacctagttcaatgaatctgaggaggctactcagtagacagtcccaccctcacacgattctttacctttcacttcatcttgcccttcattattgcagccctagcaacactccacctcctattcttgcacgaaacgggatcaaacaaccccctaggaatcacctcccattccgataaaatcaccttccacccttactacacaatcaaagacgccctcggcttacttctcttccttctctccttaatgacattaacactattctcaccagacctcctaggcgacccagacaattataccctagccaaccccttaaacacccctccccacatcaagcccgaatgatatttcctattcgcctacacaattctccgatccgtccctaacaaactaggaggcgtccttgccctattactatccatcctcatcctagcaataatccccatcctccatatatccaaacaacaaagcataatatttcgcccactaagccaatcactttattgactcctagccgcagacctcctcattctaacctgaatcggaggacaaccagtaagctacccttttaccatcattggacaagtagcatccgtactatacttcacaacaatcctaatcctaataccaactatctccctaattgaaaacaaaatactcaaatgggcctgtccttgtagtataaactaatacaccagtcttgtaaaccggagatgaaaacctttttccaaggacaaatcagagaaaaagtctttaactccaccattagcacccaaagctaagattctaatttaaactattctctgttctttcatggggaagcagatttgggtaccacccaagtattgactcacccatcaacaaccgctatgtatttcgtacattactgccagccaccatgaatattgtacggtaccataaatacttgaccacctgtagtacataaaaacccaatccacatcaaaaccccctccccatgcttacaagcaagtacagcaatcaaccctcaactatcacacatcaactgcaactccaaagccacccctcacccactaggataccaacaaacctacccacccttaacagtacatagtacataaagccatttaccgtacatagcacattacagtcaaatcccttctcgtccccatggatgacccccctcagataggggtcccttgaccaccatcctccgtgaaatcaatatcccgcacaagagtgctactctcctcgctccgggcccataacacttgggggtagctaaagtgaactgtatccgacatctggttcctacttcagggtcataaagcctaaatagcccacacgttccccttaaataagacatcacgatg

SEQ ID NO: 113 - DNA, 16569 bp, Homo sapiens mitochondrial DNA; identical to SEQ ID NO: 111
  insertion (309)..(310): 309.1INS C

SEQ ID NO: 114 - DNA, 16570 bp, Homo sapiens mitochondrial DNA; identical to SEQ ID NO: 112
  insertion (309)..(310): 309.2INS CC

SEQ ID NO: 115 - DNA, 16571 bp, Homo sapiens mitochondrial DNA
  insertion (309)..(310): 309.1INS CCC
gatcacaggtctatcaccctattaaccactcacgggagctctccatgcatttggtattttcgtctggggggtatgcacgcgatagcattgcgagacgctggagccggagcaccctatgtcgcagtatctgtctttgattcctgcctcatcctattatttatcgcacctacgttcaatattacaggcgaacatacttactaaagtgtgttaattaattaatgcttgtaggacataataataacaattgaatgtctgcacagccactttccacacagacatcataacaaaaaatttccaccaaacccccccccctcccccgcttctggccacagcacttaaacacatctctgccaaaccccaaaaacaaagaaccctaacaccagcctaaccagatttcaaattttatcttttggcggtatgcacttttaacagtcaccccccaactaacacattattttcccctcccactcccatactactaatctcatcaatacaacccccgcccatcctacccagcacacacacaccgctgctaaccccataccccgaaccaaccaaaccccaaagacaccccccacagtttatgtagcttacctcctcaaagcaatacactgaaaatgtttagacgggctcacatcaccccataaacaaataggtttggtcctagcctttctattagctcttagtaagattacacatgcaagcatccccgttccagtgagttcaccctctaaatcaccacgatcaaaaggaacaagcatcaagcacgcagcaatgcagctcaaaacgcttagcctagccacacccccacgggaaacagcagtgattaacctttagcaataaacgaaagtttaactaagctatactaaccccagggttggtcaatttcgtgccagccaccgcggtcacacgattaacccaagtcaatagaagccggcgtaaagagtgttttagatcaccccctccccaataaagctaaaactcacctgagttgtaaaaaactccagttgacacaaaatagactacgaaagtggctttaacatatctgaacacacaatagctaagacccaaactgggattagataccccactatgcttagccctaaacctcaacagttaaatcaacaaaactgctcgccagaacactacgagccacagcttaaaactcaaaggacctggcggtgcttcatatccctctagaggagcctgttctgtaatcgataaaccccgatcaacctcaccacctcttgctcagcctatataccgccatcttcagcaaaccctgatgaaggctacaaagtaagcgcaagtacccacgtaaagacgttaggtcaaggtgtagcccatgaggtggcaagaaatgggctacattttctaccccagaaaactacgatagcccttatgaaacttaagggtcgaaggtggatttagcagtaaactaagagtagagtgcttagttgaacagggccctgaagcgcgtacacaccgcccgtcaccctcctcaagtatacttcaaaggacatttaactaaaacccctacgcatttatatagaggagacaagtcgtaacatggtaagtgtactggaaagtgcacttggacgaaccagagtgtagcttaacacaaagcacccaacttacacttaggagatttcaacttaacttgaccgctctgagctaaacctagccccaaacccactccaccttactaccagacaaccttagccaaaccatttacccaaataaagtataggcgatagaaattgaaacctggcgcaatagatatagtaccgcaagggaaagatgaaaaattataaccaagcataatatagcaaggactaacccctataccttctgcataatgaattaactagaaataactttgcaaggagagccaaagctaagacccccgaaaccagacgagctacctaagaacagctaaaagagcacacccgtctatgtagcaaaatagtgggaagatttataggtagaggcgacaaacctaccgagcctggtgatagctggttgtccaagatagaatcttagttcaactttaaatttgcccacagaaccctctaaatccccttgtaaatttaactgttagtccaaagaggaacagctctttggacactaggaaaaaaccttgtagagagagtaaaaaatttaacacccatagtaggcctaaaagcagccaccaattaagaaagcgttcaagctcaacacccactacctaaaaaatcccaaacatataactgaactcctcacacccaattggaccaatctatcaccctatagaagaactaatgttagtataagtaacatgaaaacattctcctccgcataagcctgcgtcagattaaaacactgaactgacaattaacagcccaatatctacaatcaaccaacaagtcattattaccctcactgtcaacccaacacaggcatgctcataaggaaaggttaaaaaaagtaaaaggaactcggcaaatcttaccccgcctgtttaccaaaaacatcacctctagcatcaccagtattagaggcaccgcctgcccagtgacacatgtttaacggccgcggtaccctaaccgtgcaaaggtagcataatcacttgttccttaaatagggacctgtatgaatggctccacgagggttcagctgtctcttacttttaaccagtgaaattgacctgcccgtgaagaggcgggcataacacagcaagacgagaagaccctatggagctttaatttattaatgcaaacagtacctaacaaacccacaggtcctaaactaccaaacctgcattaaaaatttcggttggggcgacctcggagcagaacccaacctccgagcagtacatgctaagacttcaccagtcaaagcgaactactatactcaattgatccaataacttgaccaacggaacaagttaccctagggataacagcgcaatcctattctagagtccatatcaacaatagggtttacgacctcgatgttggatcaggacatcccgatggtgcagccgctattaaaggttcgtttgttcaacgattaaagtcctacgtgatctgagttcagaccggagtaatccaggtcggtttctatctacttcaaattcctccctgtacgaaaggacaagagaaataaggcctacttcacaaagcgccttcccccgtaaatgatatcatctcaacttagtattatacccacacccacccaagaacagggtttgttaagatggcagagcccggtaatcgcataaaacttaaaactttacagtcagaggttcaattcctcttcttaacaacatacccatggccaacctcctactcctcattgtacccattctaatcgcaatggcattcctaatgcttaccgaacgaaaaattctaggctatatacaactacgcaaaggccccaacgttgtaggcccctacgggctactacaacccttcgctgacgccataaaactcttcaccaaagagcccctaaaacccgccacatctaccatcaccctctacatcaccgccccgaccttagctctcaccatcgctcttctactatgaacccccctccccatacccaaccccctggtcaacctcaacctaggcctcctatttattctagccacctctagcctagccgtttactcaatcctctgatcagggtgagcatcaaactcaaactacgccctgatcggcgcactgcgagcagtagcccaaacaatctcatatgaagtcaccctagccatcattctactatcaacattactaataagtggctcctttaacctctccacccttatcacaacacaagaacacctctgattactcctgccatcatgacccttggccataatatgatttatctccacactagcagagaccaaccgaacccccttcgaccttgccgaaggggagtccgaactagtctcaggcttcaacatcgaatacgccgcaggccccttcgccctattcttcatagccgaatacacaaacattattataataaacaccctcaccactacaatcttcctaggaacaacatatgacgcactctcccctgaactctacacaacatattttgtcaccaagaccctacttctaacctccctgttcttatgaattcgaacagcatacccccgattccgctacgaccaactcatacacctcctatgaaaaaacttcctaccactcaccctagcattacttatatgatatgtctccatacccattacaatctccagcattccccctcaaacctaagaaatatgtctgataaaagagttactttgatagagtaaataataggagcttaaacccccttatttctaggactatgagaatcgaacccatccctgagaatccaaaattctccgtgccacctatcacaccccatcctaaagtaaggtcagctaaataagctatcgggcccataccccgaaaatgttggttatacccttcccgtactaattaatcccctggcccaacccgtcatctactctaccatctttgcaggcacactcatcacagcgctaagctcgcactgattttttacctgagtaggcctagaaataaacatgctagcttttattccagttctaaccaaaaaaataaaccctcgttccacagaagctgccatcaagtatttcctcacgcaagcaaccgcatccataatccttctaatagctatcctcttcaacaatatactctccggacaatgaaccataaccaatactaccaatcaatactcatcattaataatcataatagctatagcaataaaactaggaatagccccctttcacttctgagtcccagaggttacccaaggcacccctctgacatccggcctgcttcttctcacatgacaaaaactagcccccatctcaatcatataccaaatctctccctcactaaacgtaagccttctcctcactctctcaatcttatccatcatagcaggcagttgaggtggattaaaccaaacccagctacgcaaaatcttagcatactcctcaattacccacataggatgaataatagcagttctaccgtacaaccctaacataaccattcttaatttaactatttatattatcctaactactaccgcattcctactactcaacttaaactccagcaccacgaccctactactatctcgcacctgaaacaagctaacatgactaacacccttaattccatccaccctcctctccctaggaggcctgcccccgctaaccggctttttgcccaaatgggccattatcgaagaattcacaaaaaacaatagcctcatcatccccaccatcatagccaccatcaccctccttaacctctacttctacctacgcctaatctactccacctcaatcacactactccccatatctaacaacgtaaaaataaaatgacagtttgaacatacaaaacccaccccattcctccccacactcatcgcccttaccacgctactcctacctatctccccttttatactaataatcttatagaaatttaggttaaatacagaccaagagccttcaaagccctcagtaagttgcaatacttaatttctgtaacagctaaggactgcaaaaccccactctgcatcaactgaacgcaaatcagccactttaattaagctaagcccttactagaccaatgggacttaaacccacaaacacttagttaacagctaagcaccctaatcaactggcttcaatctacttctcccgccgccgggaaaaaaggcgggagaagccccggcaggtttgaagctgcttcttcgaatttgcaattcaatatgaaaatcacctcggagctggtaaaaagaggcctaacccctgtctttagatttacagtccaatgcttcactcagccattttacctcacccccactgatgttcgccgaccgttgactattctctacaaaccacaaagacattggaacactatacctattattcggcgcatgagctggagtcctaggcacagctctaagcctccttattcgagccgagctgggccagccaggcaaccttctaggtaacgaccacatctacaacgttatcgtcacagcccatgcatttgtaataatcttcttcatagtaatacccatcataatcggaggctttggcaactgactagttcccctaataatcggtgcccccgatatggcgtttccccgcataaacaacataagcttctgactcttacctccctctctcctactcctgctcgcatctgctatagtggaggccggagcaggaacaggttgaacagtctaccctcccttagcagggaactactcccaccctggagcctccgtagacctaaccatcttctccttacacctagcaggtgtctcctctatcttaggggccatcaatttcatcacaacaattatcaatataaaaccccctgccataacccaataccaaacgcccctcttcgtctgatccgtcctaatcacagcagtcctacttctcctatctctcccagtcctagctgctggcatcactatactactaacagaccgcaacctcaacaccaccttcttcgaccccgccggaggaggagaccccattctataccaacacctattctgatttttcggtcaccctgaagtttatattcttatcctaccaggcttcggaataatctcccatattgtaacttactactccggaaaaaaagaaccatttggatacataggtatggtctgagctatgatatcaattggcttcctagggtttatcgtgtgagcacaccatatatttacagtaggaatagacgtagacacacgagcatatttcacctccgctaccataatcatcgctatccccaccggcgtcaaagtatttagctgactcgccacactccacggaagcaatatgaaatgatctgctgcagtgctctgagccctaggattcatctttcttttcaccgtaggtggcctgactggcattgtattagcaaactcatcactagacatcgtactacacgacacgtactacgttgtagcccacttccactatgtcctatcaataggagctgtatttgccatcataggaggcttcattcactgatttcccctattctcaggctacaccctagaccaaacctacgccaaaatccatttcactatcatattcatcggcgtaaatctaactttcttcccacaacactttctcggcctatccggaatgccccgacgttactcggactaccccgatgcatacaccacatgaaacatcctatcatctgtaggctcattcatttctctaacagcagtaatattaataattttcatgatttgagaagccttcgcttcgaagcgaaaagtcctaatagtagaagaaccctccataaacctggagtgactatatggatgccccccaccctaccacacattcgaagaacccgtatacataaaatctagacaaaaaaggaaggaatcgaaccccccaaagctggtttcaagccaaccccatggcctccatgactttttcaaaaaggtattagaaaaaccatttcataactttgtcaaagttaaattataggctaaatcctatatatcttaatggcacatgcagcgcaagtaggtctacaagacgctacttcccctatcatagaagagcttatcacctttcatgatcacgccctcataatcattttccttatctgcttcctagtcctgtatgcccttttcctaacactcacaacaaaactaactaatactaacatctcagacgctcaggaaatagaaaccgtctgaactatcctgcccgccatcatcctagtcctcatcgccctcccatccctacgcatcctttacataacagacgaggtcaacgatccctcccttaccatcaaatcaattggccaccaatggtactgaacctacgagtacaccgactacggcggactaatcttcaactcctacatacttcccccattattcctagaaccaggcgacctgcgactccttgacgttgacaatcgagtagtactcccgattgaagcccccattcgtataataattacatcacaagacgtcttgcactcatgagctgtccccacattaggcttaaaaacagatgcaattcccggacgtctaaaccaaaccactttcaccgctacacgaccgggggtatactacggtcaatgctctgaaatctgtggagcaaaccacagtttcatgcccatcgtcctagaattaattcccctaaaaatctttgaaatagggcccgtatttaccctatagcaccccctctaccccctctagagcccactgtaaagctaacttagcattaaccttttaagttaaagattaagagaaccaacacctctttacagtgaaatgccccaactaaatactaccgtatggcccaccataattacccccatactccttacactattcctcatcacccaactaaaaatattaaacacaaactaccacctacctccctcaccaaagcccataaaaataaaaaattataacaaaccctgagaaccaaaatgaacgaaaatctgttcgcttcattcattgcccccacaatcctaggcctacccgccgcagtactgatcattctatttccccctctattgatccccacctccaaatatctcatcaacaaccgactaatcaccacccaacaatgactaatcaaactaacctcaaaacaaatgataaccatacacaacactaaaggacgaacctgatctcttatactagtatccttaatcatttttattgccacaactaacctcctcggactcctgcctcactcatttacaccaaccacccaactatctataaacctagccatggccatccccttatgagcgggcacagtgattataggctttcgctctaagattaaaaatgccctagcccacttcttaccacaaggcacacctacaccccttatccccatactagttattatcgaaaccatcagcctactcattcaaccaatagccctggccgtacgcctaaccgctaacattactgcaggccacctactcatgcacctaattggaagcgccaccctagcaatatcaaccattaaccttccctctacacttatcatcttcacaattctaattctactgactatcctagaaatcgctgtcgccttaatccaagcctacgttttcacacttctagtaagcctctacctgcacgacaacacataatgacccaccaatcacatgcctatcatatagtaaaacccagcccatgacccctaacaggggccctctcagccctcctaatgacctccggcctagccatgtgatttcacttccactccataacgctcctcatactaggcctactaaccaacacactaaccatataccaatgatggcgcgatgtaacacgagaaagcacataccaaggccaccacacaccacctgtccaaaaaggccttcgatacgggataatcctatttattacctcagaagtttttttcttcgcaggatttttctgagccttttaccactccagcctagcccctaccccccaattaggagggcactggcccccaacaggcatcaccccgctaaatcccctagaagtcccactcctaaacacatccgtattactcgcatcaggagtatcaatcacctgagctcaccatagtctaatagaaaacaaccgaaaccaaataattcaagcactgcttattacaattttactgggtctctattttaccctcctacaagcctcagagtacttcgagtctcccttcaccatttccgacggcatctacggctcaacattttttgtagccacaggcttccacggacttcacgtcattattggctcaactttcctcactatctgcttcatccgccaactaatatttcactttacatccaaacatcactttggcttcgaagccgccgcctgatactggcattttgtagatgtggtttgactatttctgtatgtctccatctattgatgagggtcttactcttttagtataaatagtaccgttaacttccaattaactagttttgacaacattcaaaaaagagtaataaacttcgccttaattttaataatcaacaccctcctagccttactactaataattattacattttgactaccacaactcaacggctacatagaaaaatccaccccttacgagtgcggcttcgaccctatatcccccgcccgcgtccctttctccataaaattcttcttagtagctattaccttcttattatttgatctagaaattgccctccttttacccctaccatgagccctacaaacaactaacctgccactaatagttatgtcatccctcttattaatcatcatcctagccctaagtctggcctatgagtgactacaaaaaggattagactgaaccgaattggtatatagtttaaacaaaacgaatgatttcgactcattaaattatgataatcatatttaccaaatgcccctcatttacataaatattatactagcatttaccatctcacttctaggaatactagtatatcgctcacacctcatatcctccctactatgcctagaaggaataatactatcgctgttcattatagctactctcataaccctcaacacccactccctcttagccaatattgtgcctattgccatactagtctttgccgcctgcgaagcagcggtgggcctagccctactagtctcaatctccaacacatatggcctagactacgtacataacctaaacctactccaatgctaaaactaatcgtcccaacaattatattactaccactgacatgactttccaaaaaacacataatttgaatcaacacaaccacccacagcctaattattagcatcatccctctactattttttaaccaaatcaacaacaacctatttagctgttccccaaccttttcctccgaccccctaacaacccccctcctaatactaactacctgactcctacccctcacaatcatggcaagccaacgccacttatccagtgaaccactatcacgaaaaaaactctacctctctatactaatctccctacaaatctccttaattataacattcacagccacagaactaatcatattttatatcttcttcgaaaccacacttatccccaccttggctatcatcacccgatgaggcaaccagccagaacgcctgaacgcaggcacatacttcctattctacaccctagtaggctcccttcccctactcatcgcactaatttacactcacaacaccctaggctcactaaacattctactactcactctcactgcccaagaactatcaaactcctgagccaacaacttaatatgactagcttacacaatagcttttatagtaaagatacctctttacggactccacttatgactccctaaagcccatgtcgaagcccccatcgctgggtcaatagtacttgccgcagtactcttaaaactaggcggctatggtataatacgcctcacactcattctcaaccccctgacaaaacacatagcctaccccttccttgtactatccctatgaggcataattataacaagctccatctgcctacgacaaacagacctaaaatcgctcattgcatactcttcaatcagccacatagccctcgtagtaacagccattctcatccaaaccccctgaagcttcaccggcgcagtcattctcataatcgcccacgggcttacatcctcattactattctgcctagcaaactcaaactacgaacgcactcacagtcgcatcataatcctctctcaaggacttcaaactctactcccactaatagctttttgatgacttctagcaagcctcgctaacctcgccttaccccccactattaacctactgggagaactctctgtgctagtaaccacgttctcctgatcaaatatcactctcctacttacaggactcaacatactagtcacagccctatactccctctacatatttaccacaacacaatggggctcactcacccaccacattaacaacataaaaccctcattcacacgagaaaacaccctcatgttcatacacctatcccccattctcctcctatccctcaaccccgacatcattaccgggttttcctcttgtaaatatagtttaaccaaaacatcagattgtgaatctgacaacagaggcttacgaccccttatttaccgagaaagctcacaagaactgctaactcatgcccccatgtctaacaacatggctttctcaacttttaaaggataacagctatccattggtcttaggccccaaaaattttggtgcaactccaaataaaagtaataaccatgcacactactataaccaccctaaccctgacttccctaattccccccatccttaccaccctcgttaaccctaacaaaaaaaactcatacccccattatgtaaaatccattgtcgcatccacctttattatcagtctcttccccacaacaatattcatgtgcctagaccaagaagttattatctcgaactgacactgagccacaacccaaacaacccagctctccctaagcttcaaactagactacttctccataatattcatccctgtagcattgttcgttacatggtccatcatagaattctcactgtgatatataaactcagacccaaacattaatcagttcttcaaatatctactcatcttcctaattaccatactaatcttagttaccgctaacaacctattccaactgttcatcggctgagagggcgtaggaattatatccttcttgctcatcagttgatgatacgcccgagcagatgccaacacagcagccattcaagcaatcctatacaaccgtatcggcgatatcggtttcatcctcgccttagcatgatttatcctacactccaactcatgagacccacaacaaatagcccttctaaacgctaatccaagcctcaccccactactaggcctcctcctagcagcagcaggcaaatcagcccaattaggtctccacccctgactcccctcagccatagaaggccccaccccagtctcagccctactccactcaagcactatagttgtagcaggaatcttcttactcatccgcttccaccccctagcagaaaatagcccactaatccaaactctaacactatgcttaggcgctatcaccactctgttcgcagcagtctgcgcccttacacaaaatgacatcaaaaaaatcgtagccttctccacttcaagtcaactaggactcataatagttacaatcggcatcaaccaaccacacctagcattcctgcacatctgtacccacgccttcttcaaagccatactatttatgtgctccgggtccatcatccacaaccttaacaatgaacaagatattcgaaaaataggaggactactcaaaaccatacctctcacttcaacctccctcaccattggcagcctagcattagcaggaatacctttcctcacaggtttctactccaaagaccacatcatcgaaaccgcaaacatatcatacacaaacgcctgagccctatctattactctcatcgctacctccctgacaagcgcctatagcactcgaataattcttctcaccctaacaggtcaacctcgcttccccacccttactaacattaacgaaaataaccccaccctactaaaccccattaaacgcctggcagccggaagcctattcgcaggatttctcattactaacaacatttcccccgcatcccccttccaaacaacaatccccctctacctaaaactcacagccctcgctgtcactttcctaggacttctaacagccctagacctcaactacctaaccaacaaacttaaaataaaatccccactatgcacattttatttctccaacatactcggattctaccctagcatcacacaccgcacaatcccctatctaggccttcttacgagccaaaacctgcccctactcctcctagacctaacctgactagaaaagctattacctaaaacaatttcacagcaccaaatctccacctccatcatcacctcaacccaaaaaggcataattaaactttacttcctctctttcttcttcccactcatcctaaccctactcctaatcacataacctattcccccgagcaatctcaattacaatatatacaccaacaaacaatgttcaaccagtaactactactaatcaacgcccataatcatacaaagcccccgcaccaataggatcctcccgaatcaaccctgacccctctccttcataaattattcagcttcctacactattaaagtttaccacaaccaccaccccatcatactctttcacccacagcaccaatcctacctccatcgctaaccccactaaaacactcaccaagacctcaacccctgacccccatgcctcaggatactcctcaatagccatcgctgtagtatatccaaagacaaccatcattccccctaaataaattaaaaaaactattaaacccatataacctcccccaaaattcagaataataacacacccgaccacaccgctaacaatcaatactaaacccccataaataggagaaggcttagaagaaaaccccacaaaccccattactaaacccacactcaacagaaacaaagcatacatcattattctcgcacggactacaaccacgaccaatgatatgaaaaaccatcgttgtatttcaactacaagaacaccaatgaccccaatacgcaaaactaaccccctaataaaattaattaaccactcattcatcgacctccccaccccatccaacatctccgcatgatgaaacttcggctcactccttggcgcctgcctgatcctccaaatcaccacaggactattcctagccatgcactactcaccagacgcctcaaccgccttttcatcaatcgcccacatcactcgagacgtaaattatggctgaatcatccgctaccttcacgccaatggcgcctcaatattctttatctgcctcttcctacacatcgggcgaggcctatattacggatcatttctctactcagaaacctgaaacatcggcattatcctcctgcttgcaactatagcaacagccttcataggctatgtcctcccgtgaggccaaatatcattctgaggggccacagtaattacaaacttactatccgccatcccatacattgggacagacctagttcaatgaatctgaggaggctactcagtagacagtcccaccctcacacgattctttacctttcacttcatcttgcccttcattattgcagccctagcaacactccacctcctattcttgcacgaaacgggatcaaacaaccccctaggaatcacctcccattccgataaaatcaccttccacccttactacacaatcaaagacgccctcggcttacttctcttccttctctccttaatgacattaacactattctcaccagacctcctaggcgacccagacaattataccctagccaaccccttaaacacccctccccacatcaagcccgaatgatatttcctattcgcctacacaattctccgatccgtccctaacaaactaggaggcgtccttgccctattactatccatcctcatcctagcaataatccccatcctccatatatccaaacaacaaagcataatatttcgcccactaagccaatcactttattgactcctagccgcagacctcctcattctaacctgaatcggaggacaaccagtaagctacccttttaccatcattggacaagtagcatccgtactatacttcacaacaatcctaatcctaataccaactatctccctaattgaaaacaaaatactcaaatgggcctgtccttgtagtataaactaatacaccagtcttgtaaaccggagatgaaaacctttttccaaggacaaatcagagaaaaagtctttaactccaccattagcacccaaagctaagattctaatttaaactattctctgttctttcatggggaagcagatttgggtaccacccaagtattgactcacccatcaacaaccgctatgtatttcgtacattactgccagccaccatgaatattgtacggtaccataaatacttgaccacctgtagtacataaaaacccaatccacatcaaaaccccctccccatgcttacaagcaagtacagcaatcaaccctcaactatcacacatcaactgcaactccaaagccacccctcacccactaggataccaacaaacctacccacccttaacagtacatagtacataaagccatttaccgtacatagcacattacagtcaaatcccttctcgtccccatggatgacccccctcagataggggtcccttgaccaccatcctccgtgaaatcaatatcccgcacaagagtgctactctcctcgctccgggcccataacacttgggggtagctaaagtgaactgtatccgacatctggttcctacttcagggtcataaagcctaaatagcccacacgttccccttaaataagacatcacgatg

SEQ ID NO: 116 - DNA, 16569 bp, Homo sapiens mitochondrial DNA
  insertion (311)..(312): 311.1INS C
gatcacaggtctatcaccctattaaccactcacgggagctctccatgcatttggtattttcgtctggggggtatgcacgcgatagcattgcgagacgctggagccggagcaccctatgtcgcagtatctgtctttgattcctgcctcatcctattatttatcgcacctacgttcaatattacaggcgaacatacttactaaagtgtgttaattaattaatgcttgtaggacataataataacaattgaatgtctgcacagccactttccacacagacatcataacaaaaaatttccaccaaaccccccctccccccgcttctggccacagcacttaaacacatctctgccaaaccccaaaaacaaagaaccctaacaccagcctaaccagatttcaaattttatcttttggcggtatgcacttttaacagtcaccccccaactaacacattattttcccctcccactcccatactactaatctcatcaatacaacccccgcccatcctacccagcacacacacaccgctgctaaccccataccccgaaccaaccaaaccccaaagacaccccccacagtttatgtagcttacctcctcaaagcaatacactgaaaatgtttagacgggctcacatcaccccataaacaaataggtttggtcctagcctttctattagctcttagtaagattacacatgcaagcatccccgttccagtgagttcaccctctaaatcaccacgatcaaaaggaacaagcatcaagcacgcagcaatgcagctcaaaacgcttagcctagccacacccccacgggaaacagcagtgattaacctttagcaataaacgaaagtttaactaagctatactaaccccagggttggtcaatttcgtgccagccaccgcggtcacacgattaacccaagtcaatagaagccggcgtaaagagtgttttagatcaccccctccccaataaagctaaaactcacctgagttgtaaaaaactccagttgacacaaaatagactacgaaagtggctttaacatatctgaacacacaatagctaagacccaaactgggattagataccccactatgcttagccctaaacctcaacagttaaatcaacaaaactgctcgccagaacactacgagccacagcttaaaactcaaaggacctggcggtgcttcatatccctctagaggagcctgttctgtaatcgataaaccccgatcaacctcaccacctcttgctcagcctatataccgccatcttcagcaaaccctgatgaaggctacaaagtaagcgcaagtacccacgtaaagacgttaggtcaaggtgtagcccatgaggtggcaagaaatgggctacattttctaccccagaaaactacgatagcccttatgaaacttaagggtcgaaggtggatttagcagtaaactaagagtagagtgcttagttgaacagggccctgaagcgcgtacacaccgcccgtcaccctcctcaagtatacttcaaaggacatttaactaaaacccctacgcatttatatagaggagacaagtcgtaacatggtaagtgtactggaaagtgcacttggacgaaccagagtgtagcttaacacaaagcacccaacttacacttaggagatttcaacttaacttgaccgctctgagctaaacctagccccaaacccactccaccttactaccagacaaccttagccaaaccatttacccaaataaagtataggcgatagaaattgaaacctggcgcaatagatatagtaccgcaagggaaagatgaaaaattataaccaagcataatatagcaaggactaacccctataccttctgcataatgaattaactagaaataactttgcaaggagagccaaagctaagacccccgaaaccagacgagctacctaagaacagctaaaagagcacacccgtctatgtagcaaaatagtgggaagatttataggtagaggcgacaaacctaccgagcctggtgatagctggttgtccaagatagaatcttagttcaactttaaatttgcccacagaaccctctaaatccccttgtaaatttaactgttagtccaaagaggaacagctctttggacactaggaaaaaaccttgtagagagagtaaaaaatttaacacccatagtaggcctaaaagcagccaccaattaagaaagcgttcaagctcaacacccactacctaaaaaatcccaaacatataactgaactcctcacacccaattggaccaatctatcaccctatagaagaactaatgttagtataagtaacatgaaaacattctcctccgcataagcctgcgtcagattaaaacactgaactgacaattaacagcccaatatctacaatcaaccaacaagtcattattaccctcactgtcaacccaacacaggcatgctcataaggaaaggttaaaaaaagtaaaaggaactcggcaaatcttaccccgcctgtttaccaaaaacatcacctctagcatcaccagtattagaggcaccgcctgcccagtgacacatgtttaacggccgcggtaccctaaccgtgcaaaggtagcataatcacttgttccttaaatagggacctgtatgaatggctccacgagggttcagctgtctcttacttttaaccagtgaaattgacctgcccgtgaagaggcgggcataacacagcaagacgagaagaccctatggagctttaatttattaatgcaaacagtacctaacaaacccacaggtcctaaactaccaaacctgcattaaaaatttcggttggggcgacctcggagcagaacccaacctccgagcagtacatgctaagacttcaccagtcaaagcgaactactatactcaattgatccaataacttgaccaacggaacaagttaccctagggataacagcgcaatcctattctagagtccatatcaacaatagggtttacgacctcgatgttggatcaggacatcccgatggtgcagccgctattaaaggttcgtttgttcaacgattaaagtcctacgtgatctgagttcagaccggagtaatccaggtcggtttctatctacttcaaattcctccctgtacgaaaggacaagagaaataaggcctacttcacaaagcgccttcccccgtaaatgatatcatctcaacttagtattatacccacacccacccaagaacagggtttgttaagatggcagagcccggtaatcgcataaaacttaaaactttacagtcagaggttcaattcctcttcttaacaacatacccatggccaacctcctactcctcattgtacccattctaatcgcaatggcattcctaatgcttaccgaacgaaaaattctaggctatatacaactacgcaaaggccccaacgttgtaggcccctacgggctactacaacccttcgctgacgccataaaactcttcaccaaagagcccctaaaacccgccacatctaccatcaccctctacatcaccgccccgaccttagctctcaccatcgctcttctactatgaacccccctccccatacccaaccccctggtcaacctcaacctaggcctcctatttattctagccacctctagcctagccgtttactcaatcctctgatcagggtgagcatcaaactcaaactacgccctgatcggcgcactgcgagcagtagcccaaacaatctcatatgaagtcaccctagccatcattctactatcaacattactaataagtggctcctttaacctctccacccttatcacaacacaagaacacctctgattactcctgccatcatgacccttggccataatatgatttatctccacactagcagagaccaaccgaacccccttcgaccttgccgaaggggagtccgaactagtctcaggcttcaacatcgaatacgccgcaggccccttcgccctattcttcatagccgaatacacaaacattattataataaacaccctcaccactacaatcttcctaggaacaacatatgacgcactctcccctgaactctacacaacatattttgtcaccaagaccctacttctaacctccctgttcttatgaattcgaacagcatacccccgattccgctacgaccaactcatacacctcctatgaaaaaacttcctaccactcaccctagcattacttatatgatatgtctccatacccattacaatctccagcattccccctcaaacctaagaaatatgtctgataaaagagttactttgatagagtaaataataggagcttaaacccccttatttctaggactatgagaatcgaacccatccctgagaatccaaaattctccgtgccacctatcacaccccatcctaaagtaaggtcagctaaataagctatcgggcccataccccgaaaatgttggttatacccttcccgtactaattaatcccctggcccaacccgtcatctactctaccatctttgcaggcacactcatcacagcgctaagctcgcactgattttttacctgagtaggcctagaaataaacatgctagcttttattccagttctaaccaaaaaaataaaccctcgttccacagaagctgccatcaagtatttcctcacgcaagcaaccgcatccataatccttctaatagctatcctcttcaacaatatactctccggacaatgaaccataaccaatactaccaatcaatactcatcattaataatcataatagctatagcaataaaactaggaatagccccctttcacttctgagtcccagaggttacccaaggcacccctctgacatccggcctgcttcttctcacatgacaaaaactagcccccatctcaatcatataccaaatctctccctcactaaacgtaagccttctcctcactctctcaatcttatccatcatagcaggcagttgaggtggattaaaccaaacccagctacgcaaaatcttagcatactcctcaattacccacataggatgaataatagcagttctaccgtacaaccctaacataaccattcttaatttaactatttatattatcctaactactaccgcattcctactactcaacttaaactccagcaccacgaccctactactatctcgcacctgaaacaagctaacatgactaacacccttaattccatccaccctcctctccctaggaggcctgcccccgctaaccggctttttgcccaaatgggccattatcgaagaattcacaaaaaacaatagcctcatcatccccaccatcatagccaccatcaccctccttaacctctacttctacctacgcctaatctactccacctcaatcacactactccccatatctaacaacgtaaaaataaaatgacagtttgaacatacaaaacccaccccattcctccccacactcatcgcccttaccacgctactcctacctatctccccttttatactaataatcttatagaaatttaggttaaatacagaccaagagccttcaaagccctcagtaagttgcaatacttaatttctgtaacagctaaggactgcaaaaccccactctgcatcaactgaacgcaaatcagccactttaattaagctaagcccttactagaccaatgggacttaaacccacaaacacttagttaacagctaagcaccctaatcaactggcttcaatctacttctcccgccgccgggaaaaaaggcgggagaagccccggcaggtttgaagctgcttcttcgaatttgcaattcaatatgaaaatcacctcggagctggtaaaaagaggcctaacccctgtctttagatttacagtccaatgcttcactcagccattttacctcacccccactgatgttcgccgaccgttgactattctctacaaaccacaaagacattggaacactatacctattattcggcgcatgagctggagtcctaggcacagctctaagcctccttattcgagccgagctgggccagccaggcaaccttctaggtaacgaccacatctacaacgttatcgtcacagcccatgcatttgtaataatcttcttcatagtaatacccatcataatcggaggctttggcaactgactagttcccctaataatcggtgcccccgatatggcgtttccccgcataaacaacataagcttctgactcttacctccctctctcctactcctgctcgcatctgctatagtggaggccggagcaggaacaggttgaacagtctaccctcccttagcagggaactactcccaccctggagcctccgtagacctaaccatcttctccttacacctagcaggtgtctcctctatcttaggggccatcaatttcatcacaacaattatcaatataaaaccccctgccataacccaataccaaacgcccctcttcgtctgatccgtcctaatcacagcagtcctacttctcctatctctcccagtcctagctgctggcatcactatactactaacagaccgcaacctcaacaccaccttcttcgaccccgccggaggaggagaccccattctataccaacacctattctgatttttcggtcaccctgaagtttatattcttatcctaccaggcttcggaataatctcccatattgtaacttactactccggaaaaaaagaaccatttggatacataggtatggtctgagctatgatatcaattggcttcctagggtttatcgtgtgagcacaccatatatttacagtaggaatagacgtagacacacgagcatatttcacctccgctaccataatcatcgctatccccaccggcgtcaaagtatttagctgactcgccacactccacggaagcaatatgaaatgatctgctgcagtgctctgagccctaggattcatctttcttttcaccgtaggtggcctgactggcattgtattagcaaactcatcactagacatcgtactacacgacacgtactacgttgtagcccacttccactatgtcctatcaataggagctgtatttgccatcataggaggcttcattcactgatttcccctattctcaggctacaccctagaccaaacctacgccaaaatccatttcactatcatattcatcggcgtaaatctaactttcttcccacaacactttctcggcctatccggaatgccccgacgttactcggactaccccgatgcatacaccacatgaaacatcctatcatctgtaggctcattcatttctctaacagcagtaatattaataattttcatgatttgagaagccttcgcttcgaagcgaaaagtcctaatagtagaagaaccctccataaacctggagtgactatatggatgccccccaccctaccacacattcgaagaacccgtatacataaaatctagacaaaaaaggaaggaatcgaaccccccaaagctggtttcaagccaaccccatggcctccatgactttttcaaaaaggtattagaaaaaccatttcataactttgtcaaagttaaattataggctaaatcctatatatcttaatggcacatgcagcgcaagtaggtctacaagacgctacttcccctatcatagaagagcttatcacctttcatgatcacgccctcataatcattttccttatctgcttcctagtcctgtatgcccttttcctaacactcacaacaaaactaactaatactaacatctcagacgctcaggaaatagaaaccgtctgaactatcctgcccgccatcatcctagtcctcatcgccctcccatccctacgcatcctttacataacagacgaggtcaacgatccctcccttaccatcaaatcaattggccaccaatggtactgaacctacgagtacaccgactacggcggactaatcttcaactcctacatacttcccccattattcctagaaccaggcgacctgcgactccttgacgttgacaatcgagtagtactcccgattgaagcccccattcgtataataattacatcacaagacgtcttgcactcatgagctgtccccacattaggcttaaaaacagatgcaattcccggacgtctaaaccaaaccactttcaccgctacacgaccgggggtatactacggtcaatgctctgaaatctgtggagcaaaccacagtttcatgcccatcgtcctagaattaattcccctaaaaatctttgaaatagggcccgtatttaccctatagcaccccctctaccccctctagagcccactgtaaagctaacttagcattaaccttttaagttaaagattaagagaaccaacacctctttacagtgaaatgccccaactaaatactaccgtatggcccaccataattacccccatactccttacactattcctcatcacccaactaaaaatattaaacacaaactaccacctacctccctcaccaaagcccataaaaataaaaaattataacaaaccctgagaaccaaaatgaacgaaaatctgttcgcttcattcattgcccccacaatcctaggcctacccgccgcagtactgatcattctatttccccctctattgatccccacctccaaatatctcatcaacaaccgactaatcaccacccaacaatgactaatcaaactaacctcaaaacaaatgataaccatacacaacactaaaggacgaacctgatctcttatactagtatccttaatcatttttattgccacaactaacctcctcggactcctgcctcactcatttacaccaaccacccaactatctataaacctagccatggccatccccttatgagcgggcacagtgattataggctttcgctctaagattaaaaatgccctagcccacttcttaccacaaggcacacctacaccccttatccccatactagttattatcgaaaccatcagcctactcattcaaccaatagccctggccgtacgcctaaccgctaacattactgcaggccacctactcatgcacctaattggaagcgccaccctagcaatatcaaccattaaccttccctctacacttatcatcttcacaattctaattctactgactatcctagaaatcgctgtcgccttaatccaagcctacgttttcacacttctagtaagcctctacctgcacgacaacacataatgacccaccaatcacatgcctatcatatagtaaaacccagcccatgacccctaacaggggccctctcagccctcctaatgacctccggcctagccatgtgatttcacttccactccataacgctcctcatactaggcctactaaccaacacactaaccatataccaatgatggcgcgatgtaacacgagaaagcacataccaaggccaccacacaccacctgtccaaaaaggccttcgatacgggataatcctatttattacctcagaagtttttttcttcgcaggatttttctgagccttttaccactccagcctagcccctaccccccaattaggagggcactggcccccaacaggcatcaccccgctaaatcccctagaagtcccactcctaaacacatccgtattactcgcatcaggagtatcaatcacctgagctcaccatagtctaatagaaaacaaccgaaaccaaataattcaagcactgcttattacaattttactgggtctctattttaccctcctacaagcctcagagtacttcgagtctcccttcaccatttccgacggcatctacggctcaacattttttgtagccacaggcttccacggacttcacgtcattattggctcaactttcctcactatctgcttcatccgccaactaatatttcactttacatccaaacatcactttggcttcgaagccgccgcctgatactggcattttgtagatgtggtttgactatttctgtatgtctccatctattgatgagggtcttactcttttagtataaatagtaccgttaacttccaattaactagttttgacaacattcaaaaaagagtaataaacttcgccttaattttaataatcaacaccctcctagccttactactaataattattacattttgactaccacaactcaacggctacatagaaaaatccaccccttacgagtgcggcttcgaccctatatcccccgcccgcgtccctttctccataaaattcttcttagtagctattaccttcttattatttgatctagaaattgccctccttttacccctaccatgagccctacaaacaactaacctgccactaatagttatgtcatccctcttattaatcatcatcctagccctaagtctggcctatgagtgactacaaaaaggattagactgaaccgaattggtatatagtttaaacaaaacgaatgatttcgactcattaaattatgataatcatatttaccaaatgcccctcatttacataaatattatactagcatttaccatctcacttctaggaatactagtatatcgctcacacctcatatcctccctactatgcctagaaggaataatactatcgctgttcattatagctactctcataaccctcaacacccactccctcttagccaatattgtgcctattgccatactagtctttgccgcctgcgaagcagcggtgggcctagccctactagtctcaatctccaacacatatggcctagactacgtacataacctaaacctactccaatgctaaaactaatcgtcccaacaattatattactaccactgacatgactttccaaaaaacacataatttgaatcaacacaaccacccacagcctaattattagcatcatccctctactattttttaaccaaatcaacaacaacctatttagctgttccccaaccttttcctccgaccccctaacaacccccctcctaatactaactacctgactcctacccctcacaatcatggcaagccaacgccacttatccagtgaaccactatcacgaaaaaaactctacctctctatactaatctccctacaaatctccttaattataacattcacagccacagaactaatcatattttatatcttcttcgaaaccacacttatccccaccttggctatcatcacccgatgaggcaaccagccagaacgcctgaacgcaggcacatacttcctattctacaccctagtaggctcccttcccctactcatcgcactaatttacactcacaacaccctaggctcactaaacattctactactcactctcactgcccaagaactatcaaactcctgagccaacaacttaatatgactagcttacacaatagcttttatagtaaagatacctctttacggactccacttatgactccctaaagcccatgtcgaagcccccatcgctgggtcaatagtacttgccgcagtactcttaaaactaggcggctatggtataatacgcctcacactcattctcaaccccctgacaaaacacatagcctaccccttccttgtactatccctatgaggcataattataacaagctccatctgcctacgacaaacagacctaaaatcgctcattgcatactcttcaatcagccacatagccctcgtagtaacagccattctcatccaaaccccctgaagcttcaccggcgcagtcattctcataatcgcccacgggcttacatcctcattactattctgcctagcaaactcaaactacgaacgcactcacagtcgcatcataatcctctctcaaggacttcaaactctactcccactaatagctttttgatgacttctagcaagcctcgctaacctcgccttaccccccactattaacctactgggagaactctctgtgctagtaaccacgttctcctgatcaaatatcactctcctacttacaggactcaacatactagtcacagccctatactccctctacatatttaccacaacacaatggggctcactcacccaccacattaacaacataaaaccctcattcacacgagaaaacaccctcatgttcatacacctatcccccattctcctcctatccctcaaccccgacatcattaccgggttttcctcttgtaaatatagtttaaccaaaacatcagattgtgaatctgacaacagaggcttacgaccccttatttaccgagaaagctcacaagaactgctaactcatgcccccatgtctaacaacatggctttctcaacttttaaaggataacagctatccattggtcttaggccccaaaaattttggtgcaactccaaataaaagtaataaccatgcacactactataaccaccctaaccctgacttccctaattccccccatccttaccaccctcgttaaccctaacaaaaaaaactcatacccccattatgtaaaatccattgtcgcatccacctttattatcagtctcttccccacaacaatattcatgtgcctagaccaagaagttattatctcgaactgacactgagccacaacccaaacaacccagctctccctaagcttcaaactagactacttctccataatattcatccctgtagcattgttcgttacatggtccatcatagaattctcactgtgatatataaactcagacccaaacattaatcagttcttcaaatatctactcatcttcctaattaccatactaatcttagttaccgctaacaacctattccaactgttcatcggctgagagggcgtaggaattatatccttcttgctcatcagttgatgatacgcccgagcagatgccaacacagcagccattcaagcaatcctatacaaccgtatcggcgatatcggtttcatcctcgccttagcatgatttatcctacactccaactcatgagacccacaacaaatagcccttctaaacgctaatccaagcctcaccccactactaggcctcctcctagcagcagcaggcaaatcagcccaattaggtctccacccctgactcccctcagccatagaaggccccaccccagtctcagccctactccactcaagcactatagttgtagcaggaatcttcttactcatccgcttccaccccctagcagaaaatagcccactaatccaaactctaacactatgcttaggcgctatcaccactctgttcgcagcagtctgcgcccttacacaaaatgacatcaaaaaaatcgtagccttctccacttcaagtcaactaggactcataatagttacaatcggcatcaaccaaccacacctagcattcctgcacatctgtacccacgccttcttcaaagccatactatttatgtgctccgggtccatcatccacaaccttaacaatgaacaagatattcgaaaaataggaggactactcaaaaccatacctctcacttcaacctccctcaccattggcagcctagcattagcaggaatacctttcctcacaggtttctactccaaagaccacatcatcgaaaccgcaaacatatcatacacaaacgcctgagccctatctattactctcatcgctacctccctgacaagcgcctatagcactcgaataattcttctcaccctaacaggtcaacctcgcttccccacccttactaacattaacgaaaataaccccaccctactaaaccccattaaacgcctggcagccggaagcctattcgcaggatttctcattactaacaacatttcccccgcatcccccttccaaacaacaatccccctctacctaaaactcacagccctcgctgtcactttcctaggacttctaacagccctagacctcaactacctaaccaacaaacttaaaataaaatccccactatgcacattttatttctccaacatactcggattctaccctagcatcacacaccgcacaatcccctatctaggccttcttacgagccaaaacctgcccctactcctcctagacctaacctgactagaaaagctattacctaaaacaatttcacagcaccaaatctccacctccatcatcacctcaacccaaaaaggcataattaaactttacttcctctctttcttcttcccactcatcctaaccctactcctaatcacataacctattcccccgagcaatctcaattacaatatatacaccaacaaacaatgttcaaccagtaactactactaatcaacgcccataatcatacaaagcccccgcaccaataggatcctcccgaatcaaccctgacccctctccttcataaattattcagcttcctacactattaaagtttaccacaaccaccaccccatcatactctttcacccacagcaccaatcctacctccatcgctaaccccactaaaacactcaccaagacctcaacccctgacccccatgcctcaggatactcctcaatagccatcgctgtagtatatccaaagacaaccatcattccccctaaataaattaaaaaaactattaaacccatataacctcccccaaaattcagaataataacacacccgaccacaccgctaacaatcaatactaaacccccataaataggagaaggcttagaagaaaaccccacaaaccccattactaaacccacactcaacagaaacaaagcatacatcattattctcgcacggactacaaccacgaccaatgatatgaaaaaccatcgttgtatttcaactacaagaacaccaatgaccccaatacgcaaaactaaccccctaataaaattaattaaccactcattcatcgacctccccaccccatccaacatctccgcatgatgaaacttcggctcactccttggcgcctgcctgatcctccaaatcaccacaggactattcctagccatgcactactcaccagacgcctcaaccgccttttcatcaatcgcccacatcactcgagacgtaaattatggctgaatcatccgctaccttcacgccaatggcgcctcaatattctttatctgcctcttcctacacatcgggcgaggcctatattacggatcatttctctactcagaaacctgaaacatcggcattatcctcctgcttgcaactatagcaacagccttcataggctatgtcctcccgtgaggccaaatatcattctgaggggccacagtaattacaaacttactatccgccatcccatacattgggacagacctagttcaatgaatctgaggaggctactcagtagacagtcccaccctcacacgattctttacctttcacttcatcttgcccttcattattgcagccctagcaacactccacctcctattcttgcacgaaacgggatcaaacaaccccctaggaatcacctcccattccgataaaatcaccttccacccttactacacaatcaaagacgccctcggcttacttctcttccttctctccttaatgacattaacactattctcaccagacctcctaggcgacccagacaattataccctagccaaccccttaaacacccctccccacatcaagcccgaatgatatttcctattcgcctacacaattctccgatccgtccctaacaaactaggaggcgtccttgccctattactatccatcctcatcctagcaataatccccatcctccatatatccaaacaacaaagcataatatttcgcccactaagccaatcactttattgactcctagccgcagacctcctcattctaacctgaatcggaggacaaccagtaagctacccttttaccatcattggacaagtagcatccgtactatacttcacaacaatcctaatcctaataccaactatctccctaattgaaaacaaaatactcaaatgggcctgtccttgtagtataaactaatacaccagtcttgtaaaccggagatgaaaacctttttccaaggacaaatcagagaaaaagtctttaactccaccattagcacccaaagctaagattctaatttaaactattctctgttctttcatggggaagcagatttgggtaccacccaagtattgactcacccatcaacaaccgctatgtatttcgtacattactgccagccaccatgaatattgtacggtaccataaatacttgaccacctgtagtacataaaaacccaatccacatcaaaaccccctccccatgcttacaagcaagtacagcaatcaaccctcaactatcacacatcaactgcaactccaaagccacccctcacccactaggataccaacaaacctacccacccttaacagtacatagtacataaagccatttaccgtacatagcacattacagtcaaatcccttctcgtccccatggatgacccccctcagataggggtcccttgaccaccatcctccgtgaaatcaatatcccgcacaagagtgctactctcctcgctccgggcccataacacttgggggtagctaaagtgaactgtatccgacatctggttcctacttcagggtcataaagcctaaatagcccacacgttccccttaaataagacatcacgatg

SEQ ID NO: 117 - DNA, 16569 bp, Homo sapiens mitochondrial DNA; identical to SEQ ID NO: 116
  insertion (315)..(316): 315.1INS C

SEQ ID NO: 118 - DNA, 16570 bp, Homo sapiens mitochondrial DNA
  insertion (315)..(316): 315.2INS CC
gatcacaggtctatcaccctattaaccactcacgggagctctccatgcatttggtattttcgtctggggggtatgcacgcgatagcattgcgagacgctggagccggagcaccctatgtcgcagtatctgtctttgattcctgcctcatcctattatttatcgcacctacgttcaatattacaggcgaacatacttactaaagtgtgttaattaattaatgcttgtaggacataataataacaattgaatgtctgcacagccactttccacacagacatcataacaaaaaatttccaccaaaccccccctcccccccgcttctggccacagcacttaaacacatctctgccaaaccccaaaaacaaagaaccctaacaccagcctaaccagatttcaaattttatcttttggcggtatgcacttttaacagtcaccccccaactaacacattattttcccctcccactcccatactactaatctcatcaatacaacccccgcccatcctacccagcacacacacaccgctgctaaccccataccccgaaccaaccaaaccccaaagacaccccccacagtttatgtagcttacctcctcaaagcaatacactgaaaatgtttagacgggctcacatcaccccataaacaaataggtttggtcctagcctttctattagctcttagtaagattacacatgcaagcatccccgttccagtgagttcaccctctaaatcaccacgatcaaaaggaacaagcatcaagcacgcagcaatgcagctcaaaacgcttagcctagccacacccccacgggaaacagcagtgattaacctttagcaataaacgaaagtttaactaagctatactaaccccagggttggtcaatttcgtgccagccaccgcggtcacacgattaacccaagtcaatagaagccggcgtaaagagtgttttagatcaccccctccccaataaagctaaaactcacctgagttgtaaaaaactccagttgacacaaaatagactacgaaagtggctttaacatatctgaacacacaatagctaagacccaaactgggattagataccccactatgcttagccctaaacctcaacagttaaatcaacaaaactgctcgccagaacactacgagccacagcttaaaactcaaaggacctggcggtgcttcatatccctctagaggagcctgttctgtaatcgataaaccccgatcaacctcaccacctcttgctcagcctatataccgccatcttcagcaaaccctgatgaaggctacaaagtaagcgcaagtacccacgtaaagacgttaggtcaaggtgtagcccatgaggtggcaagaaatgggctacattttctaccccagaaaactacgatagcccttatgaaacttaagggtcgaaggtggatttagcagtaaactaagagtagagtgcttagttgaacagggccctgaagcgcgtacacaccgcccgtcaccctcctcaagtatacttcaaaggacatttaactaaaacccctacgcatttatatagaggagacaagtcgtaacatggtaagtgtactggaaagtgcacttggacgaaccagagtgtagcttaacacaaagcacccaacttacacttaggagatttcaacttaacttgaccgctctgagctaaacctagccccaaacccactccaccttactaccagacaaccttagccaaaccatttacccaaataaagtataggcgatagaaattgaaacctggcgcaatagatatagtaccgcaagggaaagatgaaaaattataaccaagcataatatagcaaggactaacccctataccttctgcataatgaattaactagaaataactttgcaaggagagccaaagctaagacccccgaaaccagacgagctacctaagaacagctaaaagagcacacccgtctatgtagcaaaatagtgggaagatttataggtagaggcgacaaacctaccgagcctggtgatagctggttgtccaagatagaatcttagttcaactttaaatttgcccacagaaccctctaaatccccttgtaaatttaactgttagtccaaagaggaacagctctttggacactaggaaaaaaccttgtagagagagtaaaaaatttaacacccatagtaggcctaaaagcagccaccaattaagaaagcgttcaagctcaacacccactacctaaaaaatcccaaacatataactgaactcctcacacccaattggaccaatctatcaccctatagaagaactaatgttagtataagtaacatgaaaacattctcctccgcataagcctgcgtcagattaaaacactgaactgacaattaacagcccaatatctacaatcaaccaacaagtcattattaccctcactgtcaacccaacacaggcatgctcataaggaaaggttaaaaaaagtaaaaggaactcggcaaatcttaccccgcctgtttaccaaaaacatcacctctagcatcaccagtattagaggcaccgcctgcccagtgacacatgtttaacggccgcggtaccctaaccgtgcaaaggtagcataatcacttgttccttaaatagggacctgtatgaatggctccacgagggttcagctgtctcttacttttaaccagtgaaattgacctgcccgtgaagaggcgggcataacacagcaagacgagaagaccctatggagctttaatttattaatgcaaacagtacctaacaaacccacaggtcctaaactaccaaacctgcattaaaaatttcggttggggcgacctcggagcagaacccaacctccgagcagtacatgctaagacttcaccagtcaaagcgaactactatactcaattgatccaataacttgaccaacggaacaagttaccctagggataacagcgcaatcctattctagagtccatatcaacaatagggtttacgacctcgatgttggatcaggacatcccgatggtgcagccgctattaaaggttcgtttgttcaacgattaaagtcctacgtgatctgagttcagaccggagtaatccaggtcggtttctatctacttcaaattcctccctgtacgaaaggacaagagaaataaggcctacttcacaaagcgccttcccccgtaaatgatatcatctcaacttagtattatacccacacccacccaagaacagggtttgttaagatggcagagcccggtaatcgcataaaacttaaaactttacagtcagaggttcaattcctcttcttaacaacatacccatggccaacctcctactcctcattgtacccattctaatcgcaatggcattcctaatgcttaccgaacgaaaaattctaggctatatacaactacgcaaaggccccaacgttgtaggcccctacgggctactacaacccttcgctgacgccataaaactcttcaccaaagagcccctaaaacccgccacatctaccatcaccctctacatcaccgccccgaccttagctctcaccatcgctcttctactatgaacccccctccccatacccaaccccctggtcaacctcaacctaggcctcctatttattctagccacctctagcctagccgtttactcaatcctctgatcagggtgagcatcaaactcaaactacgccctgatcggcgcactgcgagcagtagcccaaacaatctcatatgaagtcaccctagccatcattctactatcaacattactaataagtggctcctttaacctctccacccttatcacaacacaagaacacctctgattactcctgccatcatgacccttggccataatatgatttatctccacactagcagagaccaaccgaacccccttcgaccttgccgaaggggagtccgaactagtctcaggcttcaacatcgaatacgccgcaggccccttcgccctattcttcatagccgaatacacaaacattattataataaacaccctcaccactacaatcttcctaggaacaacatatgacgcactctcccctgaactctacacaacatattttgtcaccaagaccctacttctaacctccctgttcttatgaattcgaacagcatacccccgattccgctacgaccaactcatacacctcctatgaaaaaacttcctaccactcaccctagcattacttatatgatatgtctccatacccattacaatctccagcattccccctcaaacctaagaaatatgtctgataaaagagttactttgatagagtaaataataggagcttaaacccccttatttctaggactatgagaatcgaacccatccctgagaatccaaaattctccgtgccacctatcacaccccatcctaaagtaaggtcagctaaataagctatcgggcccataccccgaaaatgttggttatacccttcccgtactaattaatcccctggcccaacccgtcatctactctaccatctttgcaggcacactcatcacagcgctaagctcgcactgattttttacctgagtaggcctagaaataaacatgctagcttttattccagttctaaccaaaaaaataaaccctcgttccacagaagctgccatcaagtatttcctcacgcaagcaaccgcatccataatccttctaatagctatcctcttcaacaatatactctccggacaatgaaccataaccaatactaccaatcaatactcatcattaataatcataatagctatagcaataaaactaggaatagccccctttcacttctgagtcccagaggttacccaaggcacccctctgacatccggcctgcttcttctcacatgacaaaaactagcccccatctcaatcatataccaaatctctccctcactaaacgtaagccttctcctcactctctcaatcttatccatcatagcaggcagttgaggtggattaaaccaaacccagctacgcaaaatcttagcatactcctcaattacccacataggatgaataatagcagttctaccgtacaaccctaacataaccattcttaatttaactatttatattatcctaactactaccgcattcctactactcaacttaaactccagcaccacgaccctactactatctcgcacctgaaacaagctaacatgactaacacccttaattccatccaccctcctctccctaggaggcctgcccccgctaaccggctttttgcccaaatgggccattatcgaagaattcacaaaaaacaatagcctcatcatccccaccatcatagccaccatcaccctccttaacctctacttctacctacgcctaatctactccacctcaatcacactactccccatatctaacaacgtaaaaataaaatgacagtttgaacatacaaaacccaccccattcctccccacactcatcgcccttaccacgctactcctacctatctccccttttatactaataatcttatagaaatttaggttaaatacagaccaagagccttcaaagccctcagtaagttgcaatacttaatttctgtaacagctaaggactgcaaaaccccactctgcatcaactgaacgcaaatcagccactttaattaagctaagcccttactagaccaatgggacttaaacccacaaacacttagttaacagctaagcaccctaatcaactggcttcaatctacttctcccgccgccgggaaaaaaggcgggagaagccccggcaggtttgaagctgcttcttcgaatttgcaattcaatatgaaaatcacctcggagctggtaaaaagaggcctaacccctgtctttagatttacagtccaatgcttcactcagccattttacctcacccccactgatgttcgccgaccgttgactattctctacaaaccacaaagacattggaacactatacctattattcggcgcatgagctggagtcctaggcacagctctaagcctccttattcgagccgagctgggccagccaggcaaccttctaggtaacgaccacatctacaacgttatcgtcacagcccatgcatttgtaataatcttcttcatagtaatacccatcataatcggaggctttggcaactgactagttcccctaataatcggtgcccccgatatggcgtttccccgcataaacaacataagcttctgactcttacctccctctctcctactcctgctcgcatctgctatagtggaggccggagcaggaacaggttgaacagtctaccctcccttagcagggaactactcccaccctggagcctccgtagacctaaccatcttctccttacacctagcaggtgtctcctctatcttaggggccatcaatttcatcacaacaattatcaatataaaaccccctgccataacccaataccaaacgcccctcttcgtctgatccgtcctaatcacagcagtcctacttctcctatctctcccagtcctagctgctggcatcactatactactaacagaccgcaacctcaacaccaccttcttcgaccccgccggaggaggagaccccattctataccaacacctattctgatttttcggtcaccctgaagtttatattcttatcctaccaggcttcggaataatctcccatattgtaacttactactccggaaaaaaagaaccatttggatacataggtatggtctgagctatgatatcaattggcttcctagggtttatcgtgtgagcacaccatatatttacagtaggaatagacgtagacacacgagcatatttcacctccgctaccataatcatcgctatccccaccggcgtcaaagtatttagctgactcgccacactccacggaagcaatatgaaatgatctgctgcagtgctctgagccctaggattcatctttcttttcaccgtaggtggcctgactggcattgtattagcaaactcatcactagacatcgtactacacgacacgtactacgttgtagcccacttccactatgtcctatcaataggagctgtatttgccatcataggaggcttcattcactgatttcccctattctcaggctacaccctagaccaaacctacgccaaaatccatttcactatcatattcatcggcgtaaatctaactttcttcccacaacactttctcggcctatccggaatgccccgacgttactcggactaccccgatgcatacaccacatgaaacatcctatcatctgtaggctcattcatttctctaacagcagtaatattaataattttcatgatttgagaagccttcgcttcgaagcgaaaagtcctaatagtagaagaaccctccataaacctggagtgactatatggatgccccccaccctaccacacattcgaagaacccgtatacataaaatctagacaaaaaaggaaggaatcgaaccccccaaagctggtttcaagccaaccccatggcctccatgactttttcaaaaaggtattagaaaaaccatttcataactttgtcaaagttaaattataggctaaatcctatatatcttaatggcacatgcagcgcaagtaggtctacaagacgctacttcccctatcatagaagagcttatcacctttcatgatcacgccctcataatcattttccttatctgcttcctagtcctgtatgcccttttcctaacactcacaacaaaactaactaatactaacatctcagacgctcaggaaatagaaaccgtctgaactatcctgcccgccatcatcctagtcctcatcgccctcccatccctacgcatcctttacataacagacgaggtcaacgatccctcccttaccatcaaatcaattggccaccaatggtactgaacctacgagtacaccgactacggcggactaatcttcaactcctacatacttcccccattattcctagaaccaggcgacctgcgactccttgacgttgacaatcgagtagtactcccgattgaagcccccattcgtataataattacatcacaagacgtcttgcactcatgagctgtccccacattaggcttaaaaacagatgcaattcccggacgtctaaaccaaaccactttcaccgctacacgaccgggggtatactacggtcaatgctctgaaatctgtggagcaaaccacagtttcatgcccatcgtcctagaattaattcccctaaaaatctttgaaatagggcccgtatttaccctatagcaccccctctaccccctctagagcccactgtaaagctaacttagcattaaccttttaagttaaagattaagagaaccaacacctctttacagtgaaatgccccaactaaatactaccgtatggcccaccataattacccccatactccttacactattcctcatcacccaactaaaaatattaaacacaaactaccacctacctccctcaccaaagcccataaaaataaaaaattataacaaaccctgagaaccaaaatgaacgaaaatctgttcgcttcattcattgcccccacaatcctaggcctacccgccgcagtactgatcattctatttccccctctattgatccccacctccaaatatctcatcaacaaccgactaatcaccacccaacaatgactaatcaaactaacctcaaaacaaatgataaccatacacaacactaaaggacgaacctgatctcttatactagtatccttaatcatttttattgccacaactaacctcctcggactcctgcctcactcatttacaccaaccacccaactatctataaacctagccatggccatccccttatgagcgggcacagtgattataggctttcgctctaagattaaaaatgccctagcccacttcttaccacaaggcacacctacaccccttatccccatactagttattatcgaaaccatcagcctactcattcaaccaatagccctggccgtacgcctaaccgctaacattactgcaggccacctactcatgcacctaattggaagcgccaccctagcaatatcaaccattaaccttccctctacacttatcatcttcacaattctaattctactgactatcctagaaatcgctgtcgccttaatccaagcctacgttttcacacttctagtaagcctctacctgcacgacaacacataatgacccaccaatcacatgcctatcatatagtaaaacccagcccatgacccctaacaggggccctctcagccctcctaatgacctccggcctagccatgtgatttcacttccactccataacgctcctcatactaggcctactaaccaacacactaaccatataccaatgatggcgcgatgtaacacgagaaagcacataccaaggccaccacacaccacctgtccaaaaaggccttcgatacgggataatcctatttattacctcagaagtttttttcttcgcaggatttttctgagccttttaccactccagcctagcccctaccccccaattaggagggcactggcccccaacaggcatcaccccgctaaatcccctagaagtcccactcctaaacacatccgtattactcgcatcaggagtatcaatcacctgagctcaccatagtctaatagaaaacaaccgaaaccaaataattcaagcactgcttattacaattttactgggtctctattttaccctcctacaagcctcagagtacttcgagtctcccttcaccatttccgacggcatctacggctcaacattttttgtagccacaggcttccacggacttcacgtcattattggctcaactttcctcactatctgcttcatccgccaactaatatttcactttacatccaaacatcactttggcttcgaagccgccgcctgatactggcattttgtagatgtggtttgactatttctgtatgtctccatctattgatgagggtcttactcttttagtataaatagtaccgttaacttccaattaactagttttgacaacattcaaaaaagagtaataaacttcgccttaattttaataatcaacaccctcctagccttactactaataattattacattttgactaccacaactcaacggctacatagaaaaatccaccccttacgagtgcggcttcgaccctatatcccccgcccgcgtccctttctccataaaattcttcttagtagctattaccttcttattatttgatctagaaattgccctccttttacccctaccatgagccctacaaacaactaacctgccactaatagttatgtcatccctcttattaatcatcatcctagccctaagtctggcctatgagtgactacaaaaaggattagactgaaccgaattggtatatagtttaaacaaaacgaatgatttcgactcattaaattatgataatcatatttaccaaatgcccctcatttacataaatattatactagcatttaccatctcacttctaggaatactagtatatcgctcacacctcatatcctccctactatgcctagaaggaataatactatcgctgttcattatagctactctcataaccctcaacacccactccctcttagccaatattgtgcctattgccatactagtctttgccgcctgcgaagcagcggtgggcctagccctactagtctcaatctccaacacatatggcctagactacgtacataacctaaacctactccaatgctaaaactaatcgtcccaacaattatattactaccactgacatgactttccaaaaaacacataatttgaatcaacacaaccacccacagcctaattattagcatcatccctctactattttttaaccaaatcaacaacaacctatttagctgttccccaaccttttcctccgaccccctaacaacccccctcctaatactaactacctgactcctacccctcacaatcatggcaagccaacgccacttatccagtgaaccactatcacgaaaaaaactctacctctctatactaatctccctacaaatctccttaattataacattcacagccacagaactaatcatattttatatcttcttcgaaaccacacttatccccaccttggctatcatcacccgatgaggcaaccagccagaacgcctgaacgcaggcacatacttcctattctacaccctagtaggctcccttcccctactcatcgcactaatttacactcacaacaccctaggctcactaaacattctactactcactctcactgcccaagaactatcaaactcctgagccaacaacttaatatgactagcttacacaatagcttttatagtaaagatacctctttacggactccacttatgactccctaaagcccatgtcgaagcccccatcgctgggtcaatagtacttgccgcagtactcttaaaactaggcggctatggtataatacgcctcacactcattctcaaccccctgacaaaacacatagcctaccccttccttgtactatccctatgaggcataattataacaagctccatctgcctacgacaaacagacctaaaatcgctcattgcatactcttcaatcagccacatagccctcgtagtaacagccattctcatccaaaccccctgaagcttcaccggcgcagtcattctcataatcgcccacgggcttacatcctcattactattctgcctagcaaactcaaactacgaacgcactcacagtcgcatcataatcctctctcaaggacttcaaactctactcccactaatagctttttgatgacttctagcaagcctcgctaacctcgccttaccccccactattaacctactgggagaactctctgtgctagtaaccacgttctcctgatcaaatatcactctcctacttacaggactcaacatactagtcacagccctatactccctctacatatttaccacaacacaatggggctcactcacccaccacattaacaacataaaaccctcattcacacgagaaaacaccctcatgttcatacacctatcccccattctcctcctatccctcaaccccgacatcattaccgggttttcctcttgtaaatatagtttaaccaaaacatcagattgtgaatctgacaacagaggcttacgaccccttatttaccgagaaagctcacaagaactgctaactcatgcccccatgtctaacaacatggctttctcaacttttaaaggataacagctatccattggtcttaggccccaaaaattttggtgcaactccaaataaaagtaataaccatgcacactactataaccaccctaaccctgacttccctaattccccccatccttaccaccctcgttaaccctaacaaaaaaaactcatacccccattatgtaaaatccattgtcgcatccacctttattatcagtctcttccccacaacaatattcatgtgcctagaccaagaagttattatctcgaactgacactgagccacaacccaaacaacccagctctccctaagcttcaaactagactacttctccataatattcatccctgtagcattgttcgttacatggtccatcatagaattctcactgtgatatataaactcagacccaaacattaatcagttcttcaaatatctactcatcttcctaattaccatactaatcttagttaccgctaacaacctattccaactgttcatcggctgagagggcgtaggaattatatccttcttgctcatcagttgatgatacgcccgagcagatgccaacacagcagccattcaagcaatcctatacaaccgtatcggcgatatcggtttcatcctcgccttagcatgatttatcctacactccaactcatgagacccacaacaaatagcccttctaaacgctaatccaagcctcaccccactactaggcctcctcctagcagcagcaggcaaatcagcccaattaggtctccacccctgactcccctcagccatagaaggccccaccccagtctcagccctactccactcaagcactatagttgtagcaggaatcttcttactcatccgcttccaccccctagcagaaaatagcccactaatccaaactctaacactatgcttaggcgctatcaccactctgttcgcagcagtctgcgcccttacacaaaatgacatcaaaaaaatcgtagccttctccacttcaagtcaactaggactcataatagttacaatcggcatcaaccaaccacacctagcattcctgcacatctgtacccacgccttcttcaaagccatactatttatgtgctccgggtccatcatccacaaccttaacaatgaacaagatattcgaaaaataggaggactactcaaaaccatacctctcacttcaacctccctcaccattggcagcctagcattagcaggaatacctttcctcacaggtttctactccaaagaccacatcatcgaaaccgcaaacatatcatacacaaacgcctgagccctatctattactctcatcgctacctccctgacaagcgcctatagcactcgaataattcttctcaccctaacaggtcaacctcgcttccccacccttactaacattaacgaaaataaccccaccctactaaaccccattaaacgcctggcagccggaagcctattcgcaggatttctcattactaacaacatttcccccgcatcccccttccaaacaacaatccccctctacctaaaactcacagccctcgctgtcactttcctaggacttctaacagccctagacctcaactacctaaccaacaaacttaaaataaaatccccactatgcacattttatttctccaacatactcggattctaccctagcatcacacaccgcacaatcccctatctaggccttcttacgagccaaaacctgcccctactcctcctagacctaacctgactagaaaagctattacctaaaacaatttcacagcaccaaatctccacctccatcatcacctcaacccaaaaaggcataattaaactttacttcctctctttcttcttcccactcatcctaaccctactcctaatcacataacctattcccccgagcaatctcaattacaatatatacaccaacaaacaatgttcaaccagtaactactactaatcaacgcccataatcatacaaagcccccgcaccaataggatcctcccgaatcaaccctgacccctctccttcataaattattcagcttcctacactattaaagtttaccacaaccaccaccccatcatactctttcacccacagcaccaatcctacctccatcgctaaccccactaaaacactcaccaagacctcaacccctgacccccatgcctcaggatactcctcaatagccatcgctgtagtatatccaaagacaaccatcattccccctaaataaattaaaaaaactattaaacccatataacctcccccaaaattcagaataataacacacccgaccacaccgctaacaatcaatactaaacccccataaataggagaaggcttagaagaaaaccccacaaaccccattactaaacccacactcaacagaaacaaagcatacatcattattctcgcacggactacaaccacgaccaatgatatgaaaaaccatcgttgtatttcaactacaagaacaccaatgaccccaatacgcaaaactaaccccctaataaaattaattaaccactcattcatcgacctccccaccccatccaacatctccgcatgatgaaacttcggctcactccttggcgcctgcctgatcctccaaatcaccacaggactattcctagccatgcactactcaccagacgcctcaaccgccttttcatcaatcgcccacatcactcgagacgtaaattatggctgaatcatccgctaccttcacgccaatggcgcctcaatattctttatctgcctcttcctacacatcgggcgaggcctatattacggatcatttctctactcagaaacctgaaacatcggcattatcctcctgcttgcaactatagcaacagccttcataggctatgtcctcccgtgaggccaaatatcattctgaggggccacagtaattacaaacttactatccgccatcccatacattgggacagacctagttcaatgaatctgaggaggctactcagtagacagtcccaccctcacacgattctttacctttcacttcatcttgcccttcattattgcagccctagcaacactccacctcctattcttgcacgaaacgggatcaaacaaccccctaggaatcacctcccattccgataaaatcaccttccacccttactacacaatcaaagacgccctcggcttacttctcttccttctctccttaatgacattaacactattctcaccagacctcctaggcgacccagacaattataccctagccaaccccttaaacacccctccccacatcaagcccgaatgatatttcctattcgcctacacaattctccgatccgtccctaacaaactaggaggcgtccttgccctattactatccatcctcatcctagcaataatccccatcctccatatatccaaacaacaaagcataatatttcgcccactaagccaatcactttattgactcctagccgcagacctcctcattctaacctgaatcggaggacaaccagtaagctacccttttaccatcattggacaagtagcatccgtactatacttcacaacaatcctaatcctaataccaactatctccctaattgaaaacaaaatactcaaatgggcctgtccttgtagtataaactaatacaccagtcttgtaaaccggagatgaaaacctttttccaaggacaaatcagagaaaaagtctttaactccaccattagcacccaaagctaagattctaatttaaactattctctgttctttcatggggaagcagatttgggtaccacccaagtattgactcacccatcaacaaccgctatgtatttcgtacattactgccagccaccatgaatattgtacggtaccataaatacttgaccacctgtagtacataaaaacccaatccacatcaaaaccccctccccatgcttacaagcaagtacagcaatcaaccctcaactatcacacatcaactgcaactccaaagccacccctcacccactaggataccaacaaacctacccacccttaacagtacatagtacataaagccatttaccgtacatagcacattacagtcaaatcccttctcgtccccatggatgacccccctcagataggggtcccttgaccaccatcctccgtgaaatcaatatcccgcacaagagtgctactctcctcgctccgggcccataacacttgggggtagctaaagtgaactgtatccgacatctggttcctacttcagggtcataaagcctaaatagcccacacgttccccttaaataagacatcacgatg

SEQ ID NO: 119 - DNA, 16569 bp, Homo sapiens mitochondrial DNA
  insertion (416)..(417): 416.1INS G
gatcacaggtctatcaccctattaaccactcacgggagctctccatgcatttggtattttcgtctggggggtatgcacgcgatagcattgcgagacgctggagccggagcaccctatgtcgcagtatctgtctttgattcctgcctcatcctattatttatcgcacctacgttcaatattacaggcgaacatacttactaaagtgtgttaattaattaatgcttgtaggacataataataacaattgaatgtctgcacagccactttccacacagacatcataacaaaaaatttccaccaaaccccccctcccccgcttctggccacagcacttaaacacatctctgccaaaccccaaaaacaaagaaccctaacaccagcctaaccagatttcaaattttatcttttggcggtatggcacttttaacagtcaccccccaactaacacattattttcccctcccactcccatactactaatctcatcaatacaacccccgcccatcctacccagcacacacacaccgctgctaaccccataccccgaaccaaccaaaccccaaagacaccccccacagtttatgtagcttacctcctcaaagcaatacactgaaaatgtttagacgggctcacatcaccccataaacaaataggtttggtcctagcctttctattagctcttagtaagattacacatgcaagcatccccgttccagtgagttcaccctctaaatcaccacgatcaaaaggaacaagcatcaagcacgcagcaatgcagctcaaaacgcttagcctagccacacccccacgggaaacagcagtgattaacctttagcaataaacgaaagtttaactaagctatactaaccccagggttggtcaatttcgtgccagccaccgcggtcacacgattaacccaagtcaatagaagccggcgtaaagagtgttttagatcaccccctccccaataaagctaaaactcacctgagttgtaaaaaactccagttgacacaaaatagactacgaaagtggctttaacatatctgaacacacaatagctaagacccaaactgggattagataccccactatgcttagccctaaacctcaacagttaaatcaacaaaactgctcgccagaacactacgagccacagcttaaaactcaaaggacctggcggtgcttcatatccctctagaggagcctgttctgtaatcgataaaccccgatcaacctcaccacctcttgctcagcctatataccgccatcttcagcaaaccctgatgaaggctacaaagtaagcgcaagtacccacgtaaagacgttaggtcaaggtgtagcccatgaggtggcaagaaatgggctacattttctaccccagaaaactacgatagcccttatgaaacttaagggtcgaaggtggatttagcagtaaactaagagtagagtgcttagttgaacagggccctgaagcgcgtacacaccgcccgtcaccctcctcaagtatacttcaaaggacatttaactaaaacccctacgcatttatatagaggagacaagtcgtaacatggtaagtgtactggaaagtgcacttggacgaaccagagtgtagcttaacacaaagcacccaacttacacttaggagatttcaacttaacttgaccgctctgagctaaacctagccccaaacccactccaccttactaccagacaaccttagccaaaccatttacccaaataaagtataggcgatagaaattgaaacctggcgcaatagatatagtaccgcaagggaaagatgaaaaattataaccaagcataatatagcaaggactaacccctataccttctgcataatgaattaactagaaataactttgcaaggagagccaaagctaagacccccgaaaccagacgagctacctaagaacagctaaaagagcacacccgtctatgtagcaaaatagtgggaagatttataggtagaggcgacaaacctaccgagcctggtgatagctggttgtccaagatagaatcttagttcaactttaaatttgcccacagaaccctctaaatccccttgtaaatttaactgttagtccaaagaggaacagctctttggacactaggaaaaaaccttgtagagagagtaaaaaatttaacacccatagtaggcctaaaagcagccaccaattaagaaagcgttcaagctcaacacccactacctaaaaaatcccaaacatataactgaactcctcacacccaattggaccaatctatcaccctatagaagaactaatgttagtataagtaacatgaaaacattctcctccgcataagcctgcgtcagattaaaacactgaactgacaattaacagcccaatatctacaatcaaccaacaagtcattattaccctcactgtcaacccaacacaggcatgctcataaggaaaggttaaaaaaagtaaaaggaactcggcaaatcttaccccgcctgtttaccaaaaacatcacctctagcatcaccagtattagaggcaccgcctgcccagtgacacatgtttaacggccgcggtaccctaaccgtgcaaaggtagcataatcacttgttccttaaatagggacctgtatgaatggctccacgagggttcagctgtctcttacttttaaccagtgaaattgacctgcccgtgaagaggcgggcataacacagcaagacgagaagaccctatggagctttaatttattaatgcaaacagtacctaacaaacccacaggtcctaaactaccaaacctgcattaaaaatttcggttggggcgacctcggagcagaacccaacctccgagcagtacatgctaagacttcaccagtcaaagcgaactactatactcaattgatccaataacttgaccaacggaacaagttaccctagggataacagcgcaatcctattctagagtccatatcaacaatagggtttacgacctcgatgttggatcaggacatcccgatggtgcagccgctattaaaggttcgtttgttcaacgattaaagtcctacgtgatctgagttcagaccggagtaatccaggtcggtttctatctacttcaaattcctccctgtacgaaaggacaagagaaataaggcctacttcacaaagcgccttcccccgtaaatgatatcatctcaacttagtattatacccacacccacccaagaacagggtttgttaagatggcagagcccggtaatcgcataaaacttaaaactttacagtcagaggttcaattcctcttcttaacaacatacccatggccaacctcctactcctcattgtacccattctaatcgcaatggcattcctaatgcttaccgaacgaaaaattctaggctatatacaactacgcaaaggccccaacgttgtaggcccctacgggctactacaacccttcgctgacgccataaaactcttcaccaaagagcccctaaaacccgccacatctaccatcaccctctacatcaccgccccgaccttagctctcaccatcgctcttctactatgaacccccctccccatacccaaccccctggtcaacctcaacctaggcctcctatttattctagccacctctagcctagccgtttactcaatcctctgatcagggtgagcatcaaactcaaactacgccctgatcggcgcactgcgagcagtagcccaaacaatctcatatgaagtcaccctagccatcattctactatcaacattactaataagtggctcctttaacctctccacccttatcacaacacaagaacacctctgattactcctgccatcatgacccttggccataatatgatttatctccacactagcagagaccaaccgaacccccttcgaccttgccgaaggggagtccgaactagtctcaggcttcaacatcgaatacgccgcaggccccttcgccctattcttcatagccgaatacacaaacattattataataaacaccctcaccactacaatcttcctaggaacaacatatgacgcactctcccctgaactctacacaacatattttgtcaccaagaccctacttctaacctccctgttcttatgaattcgaacagcatacccccgattccgctacgaccaactcatacacctcctatgaaaaaacttcctaccactcaccctagcattacttatatgatatgtctccatacccattacaatctccagcattccccctcaaacctaagaaatatgtctgataaaagagttactttgatagagtaaataataggagcttaaacccccttatttctaggactatgagaatcgaacccatccctgagaatccaaaattctccgtgccacctatcacaccccatcctaaagtaaggtcagctaaataagctatcgggcccataccccgaaaatgttggttatacccttcccgtactaattaatcccctggcccaacccgtcatctactctaccatctttgcaggcacactcatcacagcgctaagctcgcactgattttttacctgagtaggcctagaaataaacatgctagcttttattccagttctaaccaaaaaaataaaccctcgttccacagaagctgccatcaagtatttcctcacgcaagcaaccgcatccataatccttctaatagctatcctcttcaacaatatactctccggacaatgaaccataaccaatactaccaatcaatactcatcattaataatcataatagctatagcaataaaactaggaatagccccctttcacttctgagtcccagaggttacccaaggcacccctctgacatccggcctgcttcttctcacatgacaaaaactagcccccatctcaatcatataccaaatctctccctcactaaacgtaagccttctcctcactctctcaatcttatccatcatagcaggcagttgaggtggattaaaccaaacccagctacgcaaaatcttagcatactcctcaattacccacataggatgaataatagcagttctaccgtacaaccctaacataaccattcttaatttaactatttatattatcctaactactaccgcattcctactactcaacttaaactccagcaccacgaccctactactatctcgcacctgaaacaagctaacatgactaacacccttaattccatccaccctcctctccctaggaggcctgcccccgctaaccggctttttgcccaaatgggccattatcgaagaattcacaaaaaacaatagcctcatcatccccaccatcatagccaccatcaccctccttaacctctacttctacctacgcctaatctactccacctcaatcacactactccccatatctaacaacgtaaaaataaaatgacagtttgaacatacaaaacccaccccattcctccccacactcatcgcccttaccacgctactcctacctatctccccttttatactaataatcttatagaaatttaggttaaatacagaccaagagccttcaaagccctcagtaagttgcaatacttaatttctgtaacagctaaggactgcaaaaccccactctgcatcaactgaacgcaaatcagccactttaattaagctaagcccttactagaccaatgggacttaaacccacaaacacttagttaacagctaagcaccctaatcaactggcttcaatctacttctcccgccgccgggaaaaaaggcgggagaagccccggcaggtttgaagctgcttcttcgaatttgcaattcaatatgaaaatcacctcggagctggtaaaaagaggcctaacccctgtctttagatttacagtccaatgcttcactcagccattttacctcacccccactgatgttcgccgaccgttgactattctctacaaaccacaaagacattggaacactatacctattattcggcgcatgagctggagtcctaggcacagctctaagcctccttattcgagccgagctgggccagccaggcaaccttctaggtaacgaccacatctacaacgttatcgtcacagcccatgcatttgtaataatcttcttcatagtaatacccatcataatcggaggctttggcaactgactagttcccctaataatcggtgcccccgatatggcgtttccccgcataaacaacataagcttctgactcttacctccctctctcctactcctgctcgcatctgctatagtggaggccggagcaggaacaggttgaacagtctaccctcccttagcagggaactactcccaccctggagcctccgtagacctaaccatcttctccttacacctagcaggtgtctcctctatcttaggggccatcaatttcatcacaacaattatcaatataaaaccccctgccataacccaataccaaacgcccctcttcgtctgatccgtcctaatcacagcagtcctacttctcctatctctcccagtcctagctgctggcatcactatactactaacagaccgcaacctcaacaccaccttcttcgaccccgccggaggaggagaccccattctataccaacacctattctgatttttcggtcaccctgaagtttatattcttatcctaccaggcttcggaataatctcccatattgtaacttactactccggaaaaaaagaaccatttggatacataggtatggtctgagctatgatatcaattggcttcctagggtttatcgtgtgagcacaccatatatttacagtaggaatagacgtagacacacgagcatatttcacctccgctaccataatcatcgctatccccaccggcgtcaaagtatttagctgactcgccacactccacggaagcaatatgaaatgatctgctgcagtgctctgagccctaggattcatctttcttttcaccgtaggtggcctgactggcattgtattagcaaactcatcactagacatcgtactacacgacacgtactacgttgtagcccacttccactatgtcctatcaataggagctgtatttgccatcataggaggcttcattcactgatttcccctattctcaggctacaccctagaccaaacctacgccaaaatccatttcactatcatattcatcggcgtaaatctaactttcttcccacaacactttctcggcctatccggaatgccccgacgttactcggactaccccgatgcatacaccacatgaaacatcctatcatctgtaggctcattcatttctctaacagcagtaatattaataattttcatgatttgagaagccttcgcttcgaagcgaaaagtcctaatagtagaagaaccctccataaacctggagtgactatatggatgccccccaccctaccacacattcgaagaacccgtatacataaaatctagacaaaaaaggaaggaatcgaaccccccaaagctggtttcaagccaaccccatggcctccatgactttttcaaaaaggtattagaaaaaccatttcataactttgtcaaagttaaattataggctaaatcctatatatcttaatggcacatgcagcgcaagtaggtctacaagacgctacttcccctatcatagaagagcttatcacctttcatgatcacgccctcataatcattttccttatctgcttcctagtcctgtatgcccttttcctaacactcacaacaaaactaactaatactaacatctcagacgctcaggaaatagaaaccgtctgaactatcctgcccgccatcatcctagtcctcatcgccctcccatccctacgcatcctttacataacagacgaggtcaacgatccctcccttaccatcaaatcaattggccaccaatggtactgaacctacgagtacaccgactacggcggactaatcttcaactcctacatacttcccccattattcctagaaccaggcgacctgcgactccttgacgttgacaatcgagtagtactcccgattgaagcccccattcgtataataattacatcacaagacgtcttgcactcatgagctgtccccacattaggcttaaaaacagatgcaattcccggacgtctaaaccaaaccactttcaccgctacacgaccgggggtatactacggtcaatgctctgaaatctgtggagcaaaccacagtttcatgcccatcgtcctagaattaattcccctaaaaatctttgaaatagggcccgtatttaccctatagcaccccctctaccccctctagagcccactgtaaagctaacttagcattaaccttttaagttaaagattaagagaaccaacacctctttacagtgaaatgccccaactaaatactaccgtatggcccaccataattacccccatactccttacactattcctcatcacccaactaaaaatattaaacacaaactaccacctacctccctcaccaaagcccataaaaataaaaaattataacaaaccctgagaaccaaaatgaacgaaaatctgttcgcttcattcattgcccccacaatcctaggcctacccgccgcagtactgatcattctatttccccctctattgatccccacctccaaatatctcatcaacaaccgactaatcaccacccaacaatgactaatcaaactaacctcaaaacaaatgataaccatacacaacactaaaggacgaacctgatctcttatactagtatccttaatcatttttattgccacaactaacctcctcggactcctgcctcactcatttacaccaaccacccaactatctataaacctagccatggccatccccttatgagcgggcacagtgattataggctttcgctctaagattaaaaatgccctagcccacttcttaccacaaggcacacctacaccccttatccccatactagttattatcgaaaccatcagcctactcattcaaccaatagccctggccgtacgcctaaccgctaacattactgcaggccacctactcatgcacctaattggaagcgccaccctagcaatatcaaccattaaccttccctctacacttatcatcttcacaattctaattctactgactatcctagaaatcgctgtcgccttaatccaagcctacgttttcacacttctagtaagcctctacctgcacgacaacacataatgacccaccaatcacatgcctatcatatagtaaaacccagcccatgacccctaacaggggccctctcagccctcctaatgacctccggcctagccatgtgatttcacttccactccataacgctcctcatactaggcctactaaccaacacactaaccatataccaatgatggcgcgatgtaacacgagaaagcacataccaaggccaccacacaccacctgtccaaaaaggccttcgatacgggataatcctatttattacctcagaagtttttttcttcgcaggatttttctgagccttttaccactccagcctagcccctaccccccaattaggagggcactggcccccaacaggcatcaccccgctaaatcccctagaagtcccactcctaaacacatccgtattactcgcatcaggagtatcaatcacctgagctcaccatagtctaatagaaaacaaccgaaaccaaataattcaagcactgcttattacaattttactgggtctctattttaccctcctacaagcctcagagtacttcgagtctcccttcaccatttccgacggcatctacggctcaacattttttgtagccacaggcttccacggacttcacgtcattattggctcaactttcctcactatctgcttcatccgccaactaatatttcactttacatccaaacatcactttggcttcgaagccgccgcctgatactggcattttgtagatgtggtttgactatttctgtatgtctccatctattgatgagggtcttactcttttagtataaatagtaccgttaacttccaattaactagttttgacaacattcaaaaaagagtaataaacttcgccttaattttaataatcaacaccctcctagccttactactaataattattacattttgactaccacaactcaacggctacatagaaaaatccaccccttacgagtgcggcttcgaccctatatcccccgcccgcgtccctttctccataaaattcttcttagtagctattaccttcttattatttgatctagaaattgccctccttttacccctaccatgagccctacaaacaactaacctgccactaatagttatgtcatccctcttattaatcatcatcctagccctaagtctggcctatgagtgactacaaaaaggattagactgaaccgaattggtatatagtttaaacaaaacgaatgatttcgactcattaaattatgataatcatatttaccaaatgcccctcatttacataaatattatactagcatttaccatctcacttctaggaatactagtatatcgctcacacctcatatcctccctactatgcctagaaggaataatactatcgctgttcattatagctactctcataaccctcaacacccactccctcttagccaatattgtgcctattgccatactagtctttgccgcctgcgaagcagcggtgggcctagccctactagtctcaatctccaacacatatggcctagactacgtacataacctaaacctactccaatgctaaaactaatcgtcccaacaattatattactaccactgacatgactttccaaaaaacacataatttgaatcaacacaaccacccacagcctaattattagcatcatccctctactattttttaaccaaatcaacaacaacctatttagctgttccccaaccttttcctccgaccccctaacaacccccctcctaatactaactacctgactcctacccctcacaatcatggcaagccaacgccacttatccagtgaaccactatcacgaaaaaaactctacctctctatactaatctccctacaaatctccttaattataacattcacagccacagaactaatcatattttatatcttcttcgaaaccacacttatccccaccttggctatcatcacccgatgaggcaaccagccagaacgcctgaacgcaggcacatacttcctattctacaccctagtaggctcccttcccctactcatcgcactaatttacactcacaacaccctaggctcactaaacattctactactcactctcactgcccaagaactatcaaactcctgagccaacaacttaatatgactagcttacacaatagcttttatagtaaagatacctctttacggactccacttatgactccctaaagcccatgtcgaagcccccatcgctgggtcaatagtacttgccgcagtactcttaaaactaggcggctatggtataatacgcctcacactcattctcaaccccctgacaaaacacatagcctaccccttccttgtactatccctatgaggcataattataacaagctccatctgcctacgacaaacagacctaaaatcgctcattgcatactcttcaatcagccacatagccctcgtagtaacagccattctcatccaaaccccctgaagcttcaccggcgcagtcattctcataatcgcccacgggcttacatcctcattactattctgcctagcaaactcaaactacgaacgcactcacagtcgcatcataatcctctctcaaggacttcaaactctactcccactaatagctttttgatgacttctagcaagcctcgctaacctcgccttaccccccactattaacctactgggagaactctctgtgctagtaaccacgttctcctgatcaaatatcactctcctacttacaggactcaacatactagtcacagccctatactccctctacatatttaccacaacacaatggggctcactcacccaccacattaacaacataaaaccctcattcacacgagaaaacaccctcatgttcatacacctatcccccattctcctcctatccctcaaccccgacatcattaccgggttttcctcttgtaaatatagtttaaccaaaacatcagattgtgaatctgacaacagaggcttacgaccccttatttaccgagaaagctcacaagaactgctaactcatgcccccatgtctaacaacatggctttctcaacttttaaaggataacagctatccattggtcttaggccccaaaaattttggtgcaactccaaataaaagtaataaccatgcacactactataaccaccctaaccctgacttccctaattccccccatccttaccaccctcgttaaccctaacaaaaaaaactcatacccccattatgtaaaatccattgtcgcatccacctttattatcagtctcttccccacaacaatattcatgtgcctagaccaagaagttattatctcgaactgacactgagccacaacccaaacaacccagctctccctaagcttcaaactagactacttctccataatattcatccctgtagcattgttcgttacatggtccatcatagaattctcactgtgatatataaactcagacccaaacattaatcagttcttcaaatatctactcatcttcctaattaccatactaatcttagttaccgctaacaacctattccaactgttcatcggctgagagggcgtaggaattatatccttcttgctcatcagttgatgatacgcccgagcagatgccaacacagcagccattcaagcaatcctatacaaccgtatcggcgatatcggtttcatcctcgccttagcatgatttatcctacactccaactcatgagacccacaacaaatagcccttctaaacgctaatccaagcctcaccccactactaggcctcctcctagcagcagcaggcaaatcagcccaattaggtctccacccctgactcccctcagccatagaaggccccaccccagtctcagccctactccactcaagcactatagttgtagcaggaatcttcttactcatccgcttccaccccctagcagaaaatagcccactaatccaaactctaacactatgcttaggcgctatcaccactctgttcgcagcagtctgcgcccttacacaaaatgacatcaaaaaaatcgtagccttctccacttcaagtcaactaggactcataatagttacaatcggcatcaaccaaccacacctagcattcctgcacatctgtacccacgccttcttcaaagccatactatttatgtgctccgggtccatcatccacaaccttaacaatgaacaagatattcgaaaaataggaggactactcaaaaccatacctctcacttcaacctccctcaccattggcagcctagcattagcaggaatacctttcctcacaggtttctactccaaagaccacatcatcgaaaccgcaaacatatcatacacaaacgcctgagccctatctattactctcatcgctacctccctgacaagcgcctatagcactcgaataattcttctcaccctaacaggtcaacctcgcttccccacccttactaacattaacgaaaataaccccaccctactaaaccccattaaacgcctggcagccggaagcctattcgcaggatttctcattactaacaacatttcccccgcatcccccttccaaacaacaatccccctctacctaaaactcacagccctcgctgtcactttcctaggacttctaacagccctagacctcaactacctaaccaacaaacttaaaataaaatccccactatgcacattttatttctccaacatactcggattctaccctagcatcacacaccgcacaatcccctatctaggccttcttacgagccaaaacctgcccctactcctcctagacctaacctgactagaaaagctattacctaaaacaatttcacagcaccaaatctccacctccatcatcacctcaacccaaaaaggcataattaaactttacttcctctctttcttcttcccactcatcctaaccctactcctaatcacataacctattcccccgagcaatctcaattacaatatatacaccaacaaacaatgttcaaccagtaactactactaatcaacgcccataatcatacaaagcccccgcaccaataggatcctcccgaatcaaccctgacccctctccttcataaattattcagcttcctacactattaaagtttaccacaaccaccaccccatcatactctttcacccacagcaccaatcctacctccatcgctaaccccactaaaacactcaccaagacctcaacccctgacccccatgcctcaggatactcctcaatagccatcgctgtagtatatccaaagacaaccatcattccccctaaataaattaaaaaaactattaaacccatataacctcccccaaaattcagaataataacacacccgaccacaccgctaacaatcaatactaaacccccataaataggagaaggcttagaagaaaaccccacaaaccccattactaaacccacactcaacagaaacaaagcatacatcattattctcgcacggactacaaccacgaccaatgatatgaaaaaccatcgttgtatttcaactacaagaacaccaatgaccccaatacgcaaaactaaccccctaataaaattaattaaccactcattcatcgacctccccaccccatccaacatctccgcatgatgaaacttcggctcactccttggcgcctgcctgatcctccaaatcaccacaggactattcctagccatgcactactcaccagacgcctcaaccgccttttcatcaatcgcccacatcactcgagacgtaaattatggctgaatcatccgctaccttcacgccaatggcgcctcaatattctttatctgcctcttcctacacatcgggcgaggcctatattacggatcatttctctactcagaaacctgaaacatcggcattatcctcctgcttgcaactatagcaacagccttcataggctatgtcctcccgtgaggccaaatatcattctgaggggccacagtaattacaaacttactatccgccatcccatacattgggacagacctagttcaatgaatctgaggaggctactcagtagacagtcccaccctcacacgattctttacctttcacttcatcttgcccttcattattgcagccctagcaacactccacctcctattcttgcacgaaacgggatcaaacaaccccctaggaatcacctcccattccgataaaatcaccttccacccttactacacaatcaaagacgccctcggcttacttctcttccttctctccttaatgacattaacactattctcaccagacctcctaggcgacccagacaattataccctagccaaccccttaaacacccctccccacatcaagcccgaatgatatttcctattcgcctacacaattctccgatccgtccctaacaaactaggaggcgtccttgccctattactatccatcctcatcctagcaataatccccatcctccatatatccaaacaacaaagcataatatttcgcccactaagccaatcactttattgactcctagccgcagacctcctcattctaacctgaatcggaggacaaccagtaagctacccttttaccatcattggacaagtagcatccgtactatacttcacaacaatcctaatcctaataccaactatctccctaattgaaaacaaaatactcaaatgggcctgtccttgtagtataaactaatacaccagtcttgtaaaccggagatgaaaacctttttccaaggacaaatcagagaaaaagtctttaactccaccattagcacccaaagctaagattctaatttaaactattctctgttctttcatggggaagcagatttgggtaccacccaagtattgactcacccatcaacaaccgctatgtatttcgtacattactgccagccaccatgaatattgtacggtaccataaatacttgaccacctgtagtacataaaaacccaatccacatcaaaaccccctccccatgcttacaagcaagtacagcaatcaaccctcaactatcacacatcaactgcaactccaaagccacccctcacccactaggataccaacaaacctacccacccttaacagtacatagtacataaagccatttaccgtacatagcacattacagtcaaatcccttctcgtccccatggatgacccccctcagataggggtcccttgaccaccatcctccgtgaaatcaatatcccgcacaagagtgctactctcctcgctccgggcccataacacttgggggtagctaaagtgaactgtatccgacatctggttcctacttcagggtcataaagcctaaatagcccacacgttccccttaaataagacatcacgatg

SEQ ID NO: 120 - DNA, 16569 bp, Homo sapiens mitochondrial DNA
  insertion (416)..(417): 416.1INS A
gatcacaggtctatcaccctattaaccactcacgggagctctccatgcatttggtattttcgtctggggggtatgcacgcgatagcattgcgagacgctggagccggagcaccctatgtcgcagtatctgtctttgattcctgcctcatcctattatttatcgcacctacgttcaatattacaggcgaacatacttactaaagtgtgttaattaattaatgcttgtaggacataataataacaattgaatgtctgcacagccactttccacacagacatcataacaaaaaatttccaccaaaccccccctcccccgcttctggccacagcacttaaacacatctctgccaaaccccaaaaacaaagaaccctaacaccagcctaaccagatttcaaattttatcttttggcggtatagcacttttaacagtcaccccccaactaacacattattttcccctcccactcccatactactaatctcatcaatacaacccccgcccatcctacccagcacacacacaccgctgctaaccccataccccgaaccaaccaaaccccaaagacaccccccacagtttatgtagcttacctcctcaaagcaatacactgaaaatgtttagacgggctcacatcaccccataaacaaataggtttggtcctagcctttctattagctcttagtaagattacacatgcaagcatccccgttccagtgagttcaccctctaaatcaccacgatcaaaaggaacaagcatcaagcacgcagcaatgcagctcaaaacgcttagcctagccacacccccacgggaaacagcagtgattaacctttagcaataaacgaaagtttaactaagctatactaaccccagggttggtcaatttcgtgccagccaccgcggtcacacgattaacccaagtcaatagaagccggcgtaaagagtgttttagatcaccccctccccaataaagctaaaactcacctgagttgtaaaaaactccagttgacacaaaatagactacgaaagtggctttaacatatctgaacacacaatagctaagacccaaactgggattagataccccactatgcttagccctaaacctcaacagttaaatcaacaaaactgctcgccagaacactacgagccacagcttaaaactcaaaggacctggcggtgcttcatatccctctagaggagcctgttctgtaatcgataaaccccgatcaacctcaccacctcttgctcagcctatataccgccatcttcagcaaaccctgatgaaggctacaaagtaagcgcaagtacccacgtaaagacgttaggtcaaggtgtagcccatgaggtggcaagaaatgggctacattttctaccccagaaaactacgatagcccttatgaaacttaagggtcgaaggtggatttagcagtaaactaagagtagagtgcttagttgaacagggccctgaagcgcgtacacaccgcccgtcaccctcctcaagtatacttcaaaggacatttaactaaaacccctacgcatttatatagaggagacaagtcgtaacatggtaagtgtactggaaagtgcacttggacgaaccagagtgtagcttaacacaaagcacccaacttacacttaggagatttcaacttaacttgaccgctctgagctaaacctagccccaaacccactccaccttactaccagacaaccttagccaaaccatttacccaaataaagtataggcgatagaaattgaaacctggcgcaatagatatagtaccgcaagggaaagatgaaaaattataaccaagcataatatagcaaggactaacccctataccttctgcataatgaattaactagaaataactttgcaaggagagccaaagctaagacccccgaaaccagacgagctacctaagaacagctaaaagagcacacccgtctatgtagcaaaatagtgggaagatttataggtagaggcgacaaacctaccgagcctggtgatagctggttgtccaagatagaatcttagttcaactttaaatttgcccacagaaccctctaaatccccttgtaaatttaactgttagtccaaagaggaacagctctttggacactaggaaaaaaccttgtagagagagtaaaaaatttaacacccatagtaggcctaaaagcagccaccaattaagaaagcgttcaagctcaacacccactacctaaaaaatcccaaacatataactgaactcctcacacccaattggaccaatctatcaccctatagaagaactaatgttagtataagtaacatgaaaacattctcctccgcataagcctgcgtcagattaaaacactgaactgacaattaacagcccaatatctacaatcaaccaacaagtcattattaccctcactgtcaacccaacacaggcatgctcataaggaaaggttaaaaaaagtaaaaggaactcggcaaatcttaccccgcctgtttaccaaaaacatcacctctagcatcaccagtattagaggcaccgcctgcccagtgacacatgtttaacggccgcggtaccctaaccgtgcaaaggtagcataatcacttgttccttaaatagggacctgtatgaatggctccacgagggttcagctgtctcttacttttaaccagtgaaattgacctgcccgtgaagaggcgggcataacacagcaagacgagaagaccctatggagctttaatttattaatgcaaacagtacctaacaaacccacaggtcctaaactaccaaacctgcattaaaaatttcggttggggcgacctcggagcagaacccaacctccgagcagtacatgctaagacttcaccagtcaaagcgaactactatactcaattgatccaataacttgaccaacggaacaagttaccctagggataacagcgcaatcctattctagagtccatatcaacaatagggtttacgacctcgatgttggatcaggacatcccgatggtgcagccgctattaaaggttcgtttgttcaacgattaaagtcctacgtgatctgagttcagaccggagtaatccaggtcggtttctatctacttcaaattcctccctgtacgaaaggacaagagaaataaggcctacttcacaaagcgccttcccccgtaaatgatatcatctcaacttagtattatacccacacccacccaagaacagggtttgttaagatggcagagcccggtaatcgcataaaacttaaaactttacagtcagaggttcaattcctcttcttaacaacatacccatggccaacctcctactcctcattgtacccattctaatcgcaatggcattcctaatgcttaccgaacgaaaaattctaggctatatacaactacgcaaaggccccaacgttgtaggcccctacgggctactacaacccttcgctgacgccataaaactcttcaccaaagagcccctaaaacccgccacatctaccatcaccctctacatcaccgccccgaccttagctctcaccatcgctcttctactatgaacccccctccccatacccaaccccctggtcaacctcaacctaggcctcctatttattctagccacctctagcctagccgtttactcaatcctctgatcagggtgagcatcaaactcaaactacgccctgatcggcgcactgcgagcagtagcccaaacaatctcatatgaagtcaccctagccatcattctactatcaacattactaataagtggctcctttaacctctccacccttatcacaacacaagaacacctctgattactcctgccatcatgacccttggccataatatgatttatctccacactagcagagaccaaccgaacccccttcgaccttgccgaaggggagtccgaactagtctcaggcttcaacatcgaatacgccgcaggccccttcgccctattcttcatagccgaatacacaaacattattataataaacaccctcaccactacaatcttcctaggaacaacatatgacgcactctcccctgaactctacacaacatattttgtcaccaagaccctacttctaacctccctgttcttatgaattcgaacagcatacccccgattccgctacgaccaactcatacacctcctatgaaaaaacttcctaccactcaccctagcattacttatatgatatgtctccatacccattacaatctccagcattccccctcaaacctaagaaatatgtctgataaaagagttactttgatagagtaaataataggagcttaaacccccttatttctaggactatgagaatcgaacccatccctgagaatccaaaattctccgtgccacctatcacaccccatcctaaagtaaggtcagctaaataagctatcgggcccataccccgaaaatgttggttatacccttcccgtactaattaatcccctggcccaacccgtcatctactctaccatctttgcaggcacactcatcacagcgctaagctcgcactgattttttacctgagtaggcctagaaataaacatgctagcttttattccagttctaaccaaaaaaataaaccctcgttccacagaagctgccatcaagtatttcctcacgcaagcaaccgcatccataatccttctaatagctatcctcttcaacaatatactctccggacaatgaaccataaccaatactaccaatcaatactcatcattaataatcataatagctatagcaataaaactaggaatagccccctttcacttctgagtcccagaggttacccaaggcacccctctgacatccggcctgcttcttctcacatgacaaaaactagcccccatctcaatcatataccaaatctctccctcactaaacgtaagccttctcctcactctctcaatcttatccatcatagcaggcagttgaggtggattaaaccaaacccagctacgcaaaatcttagcatactcctcaattacccacataggatgaataatagcagttctaccgtacaaccctaacataaccattcttaatttaactatttatattatcctaactactaccgcattcctactactcaacttaaactccagcaccacgaccctactactatctcgcacctgaaacaagctaacatgactaacacccttaattccatccaccctcctctccctaggaggcctgcccccgctaaccggctttttgcccaaatgggccattatcgaagaattcacaaaaaacaatagcctcatcatccccaccatcatagccaccatcaccctccttaacctctacttctacctacgcctaatctactccacctcaatcacactactccccatatctaacaacgtaaaaataaaatgacagtttgaacatacaaaacccaccccattcctccccacactcatcgcccttaccacgctactcctacctatctccccttttatactaataatcttatagaaatttaggttaaatacagaccaagagccttcaaagccctcagtaagttgcaatacttaatttctgtaacagctaaggactgcaaaaccccactctgcatcaactgaacgcaaatcagccactttaattaagctaagcccttactagaccaatgggacttaaacccacaaacacttagttaacagctaagcaccctaatcaactggcttcaatctacttctcccgccgccgggaaaaaaggcgggagaagccccggcaggtttgaagctgcttcttcgaatttgcaattcaatatgaaaatcacctcggagctggtaaaaagaggcctaacccctgtctttagatttacagtccaatgcttcactcagccattttacctcacccccactgatgttcgccgaccgttgactattctctacaaaccacaaagacattggaacactatacctattattcggcgcatgagctggagtcctaggcacagctctaagcctccttattcgagccgagctgggccagccaggcaaccttctaggtaacgaccacatctacaacgttatcgtcacagcccatgcatttgtaataatcttcttcatagtaatacccatcataatcggaggctttggcaactgactagttcccctaataatcggtgcccccgatatggcgtttccccgcataaacaacataagcttctgactcttacctccctctctcctactcctgctcgcatctgctatagtggaggccggagcaggaacaggttgaacagtctaccctcccttagcagggaactactcccaccctggagcctccgtagacctaaccatcttctccttacacctagcaggtgtctcctctatcttaggggccatcaatttcatcacaacaattatcaatataaaaccccctgccataacccaataccaaacgcccctcttcgtctgatccgtcctaatcacagcagtcctacttctcctatctctcccagtcctagctgctggcatcactatactactaacagaccgcaacctcaacaccaccttcttcgaccccgccggaggaggagaccccattctataccaacacctattctgatttttcggtcaccctgaagtttatattcttatcctaccaggcttcggaataatctcccatattgtaacttactactccggaaaaaaagaaccatttggatacataggtatggtctgagctatgatatcaattggcttcctagggtttatcgtgtgagcacaccatatatttacagtaggaatagacgtagacacacgagcatatttcacctccgctaccataatcatcgctatccccaccggcgtcaaagtatttagctgactcgccacactccacggaagcaatatgaaatgatctgctgcagtgctctgagccctaggattcatctttcttttcaccgtaggtggcctgactggcattgtattagcaaactcatcactagacatcgtactacacgacacgtactacgttgtagcccacttccactatgtcctatcaataggagctgtatttgccatcataggaggcttcattcactgatttcccctattctcaggctacaccctagaccaaacctacgccaaaatccatttcactatcatattcatcggcgtaaatctaactttcttcccacaacactttctcggcctatccggaatgccccgacgttactcggactaccccgatgcatacaccacatgaaacatcctatcatctgtaggctcattcatttctctaacagcagtaatattaataattttcatgatttgagaagccttcgcttcgaagcgaaaagtcctaatagtagaagaaccctccataaacctggagtgactatatggatgccccccaccctaccacacattcgaagaacccgtatacataaaatctagacaaaaaaggaaggaatcgaaccccccaaagctggtttcaagccaaccccatggcctccatgactttttcaaaaaggtattagaaaaaccatttcataactttgtcaaagttaaattataggctaaatcctatatatcttaatggcacatgcagcgcaagtaggtctacaagacgctacttcccctatcatagaagagcttatcacctttcatgatcacgccctcataatcattttccttatctgcttcctagtcctgtatgcccttttcctaacactcacaacaaaactaactaatactaacatctcagacgctcaggaaatagaaaccgtctgaactatcctgcccgccatcatcctagtcctcatcgccctcccatccctacgcatcctttacataacagacgaggtcaacgatccctcccttaccatcaaatcaattggccaccaatggtactgaacctacgagtacaccgactacggcggactaatcttcaactcctacatacttcccccattattcctagaaccaggcgacctgcgactccttgacgttgacaatcgagtagtactcccgattgaagcccccattcgtataataattacatcacaagacgtcttgcactcatgagctgtccccacattaggcttaaaaacagatgcaattcccggacgtctaaaccaaaccactttcaccgctacacgaccgggggtatactacggtcaatgctctgaaatctgtggagcaaaccacagtttcatgcccatcgtcctagaattaattcccctaaaaatctttgaaatagggcccgtatttaccctatagcaccccctctaccccctctagagcccactgtaaagctaacttagcattaaccttttaagttaaagattaagagaaccaacacctctttacagtgaaatgccccaactaaatactaccgtatggcccaccataattacccccatactccttacactattcctcatcacccaactaaaaatattaaacacaaactaccacctacctccctcaccaaagcccataaaaataaaaaattataacaaaccctgagaaccaaaatgaacgaaaatctgttcgcttcattcattgcccccacaatcctaggcctacccgccgcagtactgatcattctatttccccctctattgatccccacctccaaatatctcatcaacaaccgactaatcaccacccaacaatgactaatcaaactaacctcaaaacaaatgataaccatacacaacactaaaggacgaacctgatctcttatactagtatccttaatcatttttattgccacaactaacctcctcggactcctgcctcactcatttacaccaaccacccaactatctataaacctagccatggccatccccttatgagcgggcacagtgattataggctttcgctctaagattaaaaatgccctagcccacttcttaccacaaggcacacctacaccccttatccccatactagttattatcgaaaccatcagcctactcattcaaccaatagccctggccgtacgcctaaccgctaacattactgcaggccacctactcatgcacctaattggaagcgccaccctagcaatatcaaccattaaccttccctctacacttatcatcttcacaattctaattctactgactatcctagaaatcgctgtcgccttaatccaagcctacgttttcacacttctagtaagcctctacctgcacgacaacacataatgacccaccaatcacatgcctatcatatagtaaaacccagcccatgacccctaacaggggccctctcagccctcctaatgacctccggcctagccatgtgatttcacttccactccataacgctcctcatactaggcctactaaccaacacactaaccatataccaatgatggcgcgatgtaacacgagaaagcacataccaaggccaccacacaccacctgtccaaaaaggccttcgatacgggataatcctatttattacctcagaagtttttttcttcgcaggatttttctgagccttttaccactccagcctagcccctaccccccaattaggagggcactggcccccaacaggcatcaccccgctaaatcccctagaagtcccactcctaaacacatccgtattactcgcatcaggagtatcaatcacctgagctcaccatagtctaatagaaaacaaccgaaaccaaataattcaagcactgcttattacaattttactgggtctctattttaccctcctacaagcctcagagtacttcgagtctcccttcaccatttccgacggcatctacggctcaacattttttgtagccacaggcttccacggacttcacgtcattattggctcaactttcctcactatctgcttcatccgccaactaatatttcactttacatccaaacatcactttggcttcgaagccgccgcctgatactggcattttgtagatgtggtttgactatttctgtatgtctccatctattgatgagggtcttactcttttagtataaatagtaccgttaacttccaattaactagttttgacaacattcaaaaaagagtaataaacttcgccttaattttaataatcaacaccctcctagccttactactaataattattacattttgactaccacaactcaacggctacatagaaaaatccaccccttacgagtgcggcttcgaccctatatcccccgcccgcgtccctttctccataaaattcttcttagtagctattaccttcttattatttgatctagaaattgccctccttttacccctaccatgagccctacaaacaactaacctgccactaatagttatgtcatccctcttattaatcatcatcctagccctaagtctggcctatgagtgactacaaaaaggattagactgaaccgaattggtatatagtttaaacaaaacgaatgatttcgactcattaaattatgataatcatatttaccaaatgcccctcatttacataaatattatactagcatttaccatctcacttctaggaatactagtatatcgctcacacctcatatcctccctactatgcctagaaggaataatactatcgctgttcattatagctactctcataaccctcaacacccactccctcttagccaatattgtgcctattgccatactagtctttgccgcctgcgaagcagcggtgggcctagccctactagtctcaatctccaacacatatggcctagactacgtacataacctaaacctactccaatgctaaaactaatcgtcccaacaattatattactaccactgacatgactttccaaaaaacacataatttgaatcaacacaaccacccacagcctaattattagcatcatccctctactattttttaaccaaatcaacaacaacctatttagctgttccccaaccttttcctccgaccccctaacaacccccctcctaatactaactacctgactcctacccctcacaatcatggcaagccaacgccacttatccagtgaaccactatcacgaaaaaaactctacctctctatactaatctccctacaaatctccttaattataacattcacagccacagaactaatcatattttatatcttcttcgaaaccacacttatccccaccttggctatcatcacccgatgaggcaaccagccagaacgcctgaacgcaggcacatacttcctattctacaccctagtaggctcccttcccctactcatcgcactaatttacactcacaacaccctaggctcactaaacattctactactcactctcactgcccaagaactatcaaactcctgagccaacaacttaatatgactagcttacacaatagcttttatagtaaagatacctctttacggactccacttatgactccctaaagcccatgtcgaagcccccatcgctgggtcaatagtacttgccgcagtactcttaaaactaggcggctatggtataatacgcctcacactcattctcaaccccctgacaaaacacatagcctaccccttccttgtactatccctatgaggcataattataacaagctccatctgcctacgacaaacagacctaaaatcgctcattgcatactcttcaatcagccacatagccctcgtagtaacagccattctcatccaaaccccctgaagcttcaccggcgcagtcattctcataatcgcccacgggcttacatcctcattactattctgcctagcaaactcaaactacgaacgcactcacagtcgcatcataatcctctctcaaggacttcaaactctactcccactaatagctttttgatgacttctagcaagcctcgctaacctcgccttaccccccactattaacctactgggagaactctctgtgctagtaaccacgttctcctgatcaaatatcactctcctacttacaggactcaacatactagtcacagccctatactccctctacatatttaccacaacacaatggggctcactcacccaccacattaacaacataaaaccctcattcacacgagaaaacaccctcatgttcatacacctatcccccattctcctcctatccctcaaccccgacatcattaccgggttttcctcttgtaaatatagtttaaccaaaacatcagattgtgaatctgacaacagaggcttacgaccccttatttaccgagaaagctcacaagaactgctaactcatgcccccatgtctaacaacatggctttctcaacttttaaaggataacagctatccattggtcttaggccccaaaaattttggtgcaactccaaataaaagtaataaccatgcacactactataaccaccctaaccctgacttccctaattccccccatccttaccaccctcgttaaccctaacaaaaaaaactcatacccccattatgtaaaatccattgtcgcatccacctttattatcagtctcttccccacaacaatattcatgtgcctagaccaagaagttattatctcgaactgacactgagccacaacccaaacaacccagctctccctaagcttcaaactagactacttctccataatattcatccctgtagcattgttcgttacatggtccatcatagaattctcactgtgatatataaactcagacccaaacattaatcagttcttcaaatatctactcatcttcctaattaccatactaatcttagttaccgctaacaacctattccaactgttcatcggctgagagggcgtaggaattatatccttcttgctcatcagttgatgatacgcccgagcagatgccaacacagcagccattcaagcaatcctatacaaccgtatcggcgatatcggtttcatcctcgccttagcatgatttatcctacactccaactcatgagacccacaacaaatagcccttctaaacgctaatccaagcctcaccccactactaggcctcctcctagcagcagcaggcaaatcagcccaattaggtctccacccctgactcccctcagccatagaaggccccaccccagtctcagccctactccactcaagcactatagttgtagcaggaatcttcttactcatccgcttccaccccctagcagaaaatagcccactaatccaaactctaacactatgcttaggcgctatcaccactctgttcgcagcagtctgcgcccttacacaaaatgacatcaaaaaaatcgtagccttctccacttcaagtcaactaggactcataatagttacaatcggcatcaaccaaccacacctagcattcctgcacatctgtacccacgccttcttcaaagccatactatttatgtgctccgggtccatcatccacaaccttaacaatgaacaagatattcgaaaaataggaggactactcaaaaccatacctctcacttcaacctccctcaccattggcagcctagcattagcaggaatacctttcctcacaggtttctactccaaagaccacatcatcgaaaccgcaaacatatcatacacaaacgcctgagccctatctattactctcatcgctacctccctgacaagcgcctatagcactcgaataattcttctcaccctaacaggtcaacctcgcttccccacccttactaacattaacgaaaataaccccaccctactaaaccccattaaacgcctggcagccggaagcctattcgcaggatttctcattactaacaacatttcccccgcatcccccttccaaacaacaatccccctctacctaaaactcacagccctcgctgtcactttcctaggacttctaacagccctagacctcaactacctaaccaacaaacttaaaataaaatccccactatgcacattttatttctccaacatactcggattctaccctagcatcacacaccgcacaatcccctatctaggccttcttacgagccaaaacctgcccctactcctcctagacctaacctgactagaaaagctattacctaaaacaatttcacagcaccaaatctccacctccatcatcacctcaacccaaaaaggcataattaaactttacttcctctctttcttcttcccactcatcctaaccctactcctaatcacataacctattcccccgagcaatctcaattacaatatatacaccaacaaacaatgttcaaccagtaactactactaatcaacgcccataatcatacaaagcccccgcaccaataggatcctcccgaatcaaccctgacccctctccttcataaattattcagcttcctacactattaaagtttaccacaaccaccaccccatcatactctttcacccacagcaccaatcctacctccatcgctaaccccactaaaacactcaccaagacctcaacccctgacccccatgcctcaggatactcctcaatagccatcgctgtagtatatccaaagacaaccatcattccccctaaataaattaaaaaaactattaaacccatataacctcccccaaaattcagaataataacacacccgaccacaccgctaacaatcaatactaaacccccataaataggagaaggcttagaagaaaaccccacaaaccccattactaaacccacactcaacagaaacaaagcatacatcattattctcgcacggactacaaccacgaccaatgatatgaaaaaccatcgttgtatttcaactacaagaacaccaatgaccccaatacgcaaaactaaccccctaataaaattaattaaccactcattcatcgacctccccaccccatccaacatctccgcatgatgaaacttcggctcactccttggcgcctgcctgatcctccaaatcaccacaggactattcctagccatgcactactcaccagacgcctcaaccgccttttcatcaatcgcccacatcactcgagacgtaaattatggctgaatcatccgctaccttcacgccaatggcgcctcaatattctttatctgcctcttcctacacatcgggcgaggcctatattacggatcatttctctactcagaaacctgaaacatcggcattatcctcctgcttgcaactatagcaacagccttcataggctatgtcctcccgtgaggccaaatatcattctgaggggccacagtaattacaaacttactatccgccatcccatacattgggacagacctagttcaatgaatctgaggaggctactcagtagacagtcccaccctcacacgattctttacctttcacttcatcttgcccttcattattgcagccctagcaacactccacctcctattcttgcacgaaacgggatcaaacaaccccctaggaatcacctcccattccgataaaatcaccttccacccttactacacaatcaaagacgccctcggcttacttctcttccttctctccttaatgacattaacactattctcaccagacctcctaggcgacccagacaattataccctagccaaccccttaaacacccctccccacatcaagcccgaatgatatttcctattcgcctacacaattctccgatccgtccctaacaaactaggaggcgtccttgccctattactatccatcctcatcctagcaataatccccatcctccatatatccaaacaacaaagcataatatttcgcccactaagccaatcactttattgactcctagccgcagacctcctcattctaacctgaatcggaggacaaccagtaagctacccttttaccatcattggacaagtagcatccgtactatacttcacaacaatcctaatcctaataccaactatctccctaattgaaaacaaaatactcaaatgggcctgtccttgtagtataaactaatacaccagtcttgtaaaccggagatgaaaacctttttccaaggacaaatcagagaaaaagtctttaactccaccattagcacccaaagctaagattctaatttaaactattctctgttctttcatggggaagcagatttgggtaccacccaagtattgactcacccatcaacaaccgctatgtatttcgtacattactgccagccaccatgaatattgtacggtaccataaatacttgaccacctgtagtacataaaaacccaatccacatcaaaaccccctccccatgcttacaagcaagtacagcaatcaaccctcaactatcacacatcaactgcaactccaaagccacccctcacccactaggataccaacaaacctacccacccttaacagtacatagtacataaagccatttaccgtacatagcacattacagtcaaatcccttctcgtccccatggatgacccccctcagataggggtcccttgaccaccatcctccgtgaaatcaatatcccgcacaagagtgctactctcctcgctccgggcccataacacttgggggtagctaaagtgaactgtatccgacatctggttcctacttcagggtcataaagcctaaatagcccacacgttccccttaaataagacatcacgatg

SEQ ID NO: 121 - DNA, 16569 bp, Homo sapiens mitochondrial DNA
  insertion (514)..(515): 514.1INS C
gatcacaggtctatcaccctattaaccactcacgggagctctccatgcatttggtattttcgtctggggggtatgcacgcgatagcattgcgagacgctggagccggagcaccctatgtcgcagtatctgtctttgattcctgcctcatcctattatttatcgcacctacgttcaatattacaggcgaacatacttactaaagtgtgttaattaattaatgcttgtaggacataataataacaattgaatgtctgcacagccactttccacacagacatcataacaaaaaatttccaccaaaccccccctcccccgcttctggccacagcacttaaacacatctctgccaaaccccaaaaacaaagaaccctaacaccagcctaaccagatttcaaattttatcttttggcggtatgcacttttaacagtcaccccccaactaacacattattttcccctcccactcccatactactaatctcatcaatacaacccccgcccatcctacccagcaacacacacaccgctgctaaccccataccccgaaccaaccaaaccccaaagacaccccccacagtttatgtagcttacctcctcaaagcaatacactgaaaatgtttagacgggctcacatcaccccataaacaaataggtttggtcctagcctttctattagctcttagtaagattacacatgcaagcatccccgttccagtgagttcaccctctaaatcaccacgatcaaaaggaacaagcatcaagcacgcagcaatgcagctcaaaacgcttagcctagccacacccccacgggaaacagcagtgattaacctttagcaataaacgaaagtttaactaagctatactaaccccagggttggtcaatttcgtgccagccaccgcggtcacacgattaacccaagtcaatagaagccggcgtaaagagtgttttagatcaccccctccccaataaagctaaaactcacctgagttgtaaaaaactccagttgacacaaaatagactacgaaagtggctttaacatatctgaacacacaatagctaagacccaaactgggattagataccccactatgcttagccctaaacctcaacagttaaatcaacaaaactgctcgccagaacactacgagccacagcttaaaactcaaaggacctggcggtgcttcatatccctctagaggagcctgttctgtaatcgataaaccccgatcaacctcaccacctcttgctcagcctatataccgccatcttcagcaaaccctgatgaaggctacaaagtaagcgcaagtacccacgtaaagacgttaggtcaaggtgtagcccatgaggtggcaagaaatgggctacattttctaccccagaaaactacgatagcccttatgaaacttaagggtcgaaggtggatttagcagtaaactaagagtagagtgcttagttgaacagggccctgaagcgcgtacacaccgcccgtcaccctcctcaagtatacttcaaaggacatttaactaaaacccctacgcatttatatagaggagacaagtcgtaacatggtaagtgtactggaaagtgcacttggacgaaccagagtgtagcttaacacaaagcacccaacttacacttaggagatttcaacttaacttgaccgctctgagctaaacctagccccaaacccactccaccttactaccagacaaccttagccaaaccatttacccaaataaagtataggcgatagaaattgaaacctggcgcaatagatatagtaccgcaagggaaagatgaaaaattataaccaagcataatatagcaaggactaacccctataccttctgcataatgaattaactagaaataactttgcaaggagagccaaagctaagacccccgaaaccagacgagctacctaagaacagctaaaagagcacacccgtctatgtagcaaaatagtgggaagatttataggtagaggcgacaaacctaccgagcctggtgatagctggttgtccaagatagaatcttagttcaactttaaatttgcccacagaaccctctaaatccccttgtaaatttaactgttagtccaaagaggaacagctctttggacactaggaaaaaaccttgtagagagagtaaaaaatttaacacccatagtaggcctaaaagcagccaccaattaagaaagcgttcaagctcaacacccactacctaaaaaatcccaaacatataactgaactcctcacacccaattggaccaatctatcaccctatagaagaactaatgttagtataagtaacatgaaaacattctcctccgcataagcctgcgtcagattaaaacactgaactgacaattaacagcccaatatctacaatcaaccaacaagtcattattaccctcactgtcaacccaacacaggcatgctcataaggaaaggttaaaaaaagtaaaaggaactcggcaaatcttaccccgcctgtttaccaaaaacatcacctctagcatcaccagtattagaggcaccgcctgcccagtgacacatgtttaacggccgcggtaccctaaccgtgcaaaggtagcataatcacttgttccttaaatagggacctgtatgaatggctccacgagggttcagctgtctcttacttttaaccagtgaaattgacctgcccgtgaagaggcgggcataacacagcaagacgagaagaccctatggagctttaatttattaatgcaaacagtacctaacaaacccacaggtcctaaactaccaaacctgcattaaaaatttcggttggggcgacctcggagcagaacccaacctccgagcagtacatgctaagacttcaccagtcaaagcgaactactatactcaattgatccaataacttgaccaacggaacaagttaccctagggataacagcgcaatcctattctagagtccatatcaacaatagggtttacgacctcgatgttggatcaggacatcccgatggtgcagccgctattaaaggttcgtttgttcaacgattaaagtcctacgtgatctgagttcagaccggagtaatccaggtcggtttctatctacttcaaattcctccctgtacgaaaggacaagagaaataaggcctacttcacaaagcgccttcccccgtaaatgatatcatctcaacttagtattatacccacacccacccaagaacagggtttgttaagatggcagagcccggtaatcgcataaaacttaaaactttacagtcagaggttcaattcctcttcttaacaacatacccatggccaacctcctactcctcattgtacccattctaatcgcaatggcattcctaatgcttaccgaacgaaaaattctaggctatatacaactacgcaaaggccccaacgttgtaggcccctacgggctactacaacccttcgctgacgccataaaactcttcaccaaagagcccctaaaacccgccacatctaccatcaccctctacatcaccgccccgaccttagctctcaccatcgctcttctactatgaacccccctccccatacccaaccccctggtcaacctcaacctaggcctcctatttattctagccacctctagcctagccgtttactcaatcctctgatcagggtgagcatcaaactcaaactacgccctgatcggcgcactgcgagcagtagcccaaacaatctcatatgaagtcaccctagccatcattctactatcaacattactaataagtggctcctttaacctctccacccttatcacaacacaagaacacctctgattactcctgccatcatgacccttggccataatatgatttatctccacactagcagagaccaaccgaacccccttcgaccttgccgaaggggagtccgaactagtctcaggcttcaacatcgaatacgccgcaggccccttcgccctattcttcatagccgaatacacaaacattattataataaacaccctcaccactacaatcttcctaggaacaacatatgacgcactctcccctgaactctacacaacatattttgtcaccaagaccctacttctaacctccctgttcttatgaattcgaacagcatacccccgattccgctacgaccaactcatacacctcctatgaaaaaacttcctaccactcaccctagcattacttatatgatatgtctccatacccattacaatctccagcattccccctcaaacctaagaaatatgtctgataaaagagttactttgatagagtaaataataggagcttaaacccccttatttctaggactatgagaatcgaacccatccctgagaatccaaaattctccgtgccacctatcacaccccatcctaaagtaaggtcagctaaataagctatcgggcccataccccgaaaatgttggttatacccttcccgtactaattaatcccctggcccaacccgtcatctactctaccatctttgcaggcacactcatcacagcgctaagctcgcactgattttttacctgagtaggcctagaaataaacatgctagcttttattccagttctaaccaaaaaaataaaccctcgttccacagaagctgccatcaagtatttcctcacgcaagcaaccgcatccataatccttctaatagctatcctcttcaacaatatactctccggacaatgaaccataaccaatactaccaatcaatactcatcattaataatcataatagctatagcaataaaactaggaatagccccctttcacttctgagtcccagaggttacccaaggcacccctctgacatccggcctgcttcttctcacatgacaaaaactagcccccatctcaatcatataccaaatctctccctcactaaacgtaagccttctcctcactctctcaatcttatccatcatagcaggcagttgaggtggattaaaccaaacccagctacgcaaaatcttagcatactcctcaattacccacataggatgaataatagcagttctaccgtacaaccctaacataaccattcttaatttaactatttatattatcctaactactaccgcattcctactactcaacttaaactccagcaccacgaccctactactatctcgcacctgaaacaagctaacatgactaacacccttaattccatccaccctcctctccctaggaggcctgcccccgctaaccggctttttgcccaaatgggccattatcgaagaattcacaaaaaacaatagcctcatcatccccaccatcatagccaccatcaccctccttaacctctacttctacctacgcctaatctactccacctcaatcacactactccccatatctaacaacgtaaaaataaaatgacagtttgaacatacaaaacccaccccattcctccccacactcatcgcccttaccacgctactcctacctatctccccttttatactaataatcttatagaaatttaggttaaatacagaccaagagccttcaaagccctcagtaagttgcaatacttaatttctgtaacagctaaggactgcaaaaccccactctgcatcaactgaacgcaaatcagccactttaattaagctaagcccttactagaccaatgggacttaaacccacaaacacttagttaacagctaagcaccctaatcaactggcttcaatctacttctcccgccgccgggaaaaaaggcgggagaagccccggcaggtttgaagctgcttcttcgaatttgcaattcaatatgaaaatcacctcggagctggtaaaaagaggcctaacccctgtctttagatttacagtccaatgcttcactcagccattttacctcacccccactgatgttcgccgaccgttgactattctctacaaaccacaaagacattggaacactatacctattattcggcgcatgagctggagtcctaggcacagctctaagcctccttattcgagccgagctgggccagccaggcaaccttctaggtaacgaccacatctacaacgttatcgtcacagcccatgcatttgtaataatcttcttcatagtaatacccatcataatcggaggctttggcaactgactagttcccctaataatcggtgcccccgatatggcgtttccccgcataaacaacataagcttctgactcttacctccctctctcctactcctgctcgcatctgctatagtggaggccggagcaggaacaggttgaacagtctaccctcccttagcagggaactactcccaccctggagcctccgtagacctaaccatcttctccttacacctagcaggtgtctcctctatcttaggggccatcaatttcatcacaacaattatcaatataaaaccccctgccataacccaataccaaacgcccctcttcgtctgatccgtcctaatcacagcagtcctacttctcctatctctcccagtcctagctgctggcatcactatactactaacagaccgcaacctcaacaccaccttcttcgaccccgccggaggaggagaccccattctataccaacacctattctgatttttcggtcaccctgaagtttatattcttatcctaccaggcttcggaataatctcccatattgtaacttactactccggaaaaaaagaaccatttggatacataggtatggtctgagctatgatatcaattggcttcctagggtttatcgtgtgagcacaccatatatttacagtaggaatagacgtagacacacgagcatatttcacctccgctaccataatcatcgctatccccaccggcgtcaaagtatttagctgactcgccacactccacggaagcaatatgaaatgatctgctgcagtgctctgagccctaggattcatctttcttttcaccgtaggtggcctgactggcattgtattagcaaactcatcactagacatcgtactacacgacacgtactacgttgtagcccacttccactatgtcctatcaataggagctgtatttgccatcataggaggcttcattcactgatttcccctattctcaggctacaccctagaccaaacctacgccaaaatccatttcactatcatattcatcggcgtaaatctaactttcttcccacaacactttctcggcctatccggaatgccccgacgttactcggactaccccgatgcatacaccacatgaaacatcctatcatctgtaggctcattcatttctctaacagcagtaatattaataattttcatgatttgagaagccttcgcttcgaagcgaaaagtcctaatagtagaagaaccctccataaacctggagtgactatatggatgccccccaccctaccacacattcgaagaacccgtatacataaaatctagacaaaaaaggaaggaatcgaaccccccaaagctggtttcaagccaaccccatggcctccatgactttttcaaaaaggtattagaaaaaccatttcataactttgtcaaagttaaattataggctaaatcctatatatcttaatggcacatgcagcgcaagtaggtctacaagacgctacttcccctatcatagaagagcttatcacctttcatgatcacgccctcataatcattttccttatctgcttcctagtcctgtatgcccttttcctaacactcacaacaaaactaactaatactaacatctcagacgctcaggaaatagaaaccgtctgaactatcctgcccgccatcatcctagtcctcatcgccctcccatccctacgcatcctttacataacagacgaggtcaacgatccctcccttaccatcaaatcaattggccaccaatggtactgaacctacgagtacaccgactacggcggactaatcttcaactcctacatacttcccccattattcctagaaccaggcgacctgcgactccttgacgttgacaatcgagtagtactcccgattgaagcccccattcgtataataattacatcacaagacgtcttgcactcatgagctgtccccacattaggcttaaaaacagatgcaattcccggacgtctaaaccaaaccactttcaccgctacacgaccgggggtatactacggtcaatgctctgaaatctgtggagcaaaccacagtttcatgcccatcgtcctagaattaattcccctaaaaatctttgaaatagggcccgtatttaccctatagcaccccctctaccccctctagagcccactgtaaagctaacttagcattaaccttttaagttaaagattaagagaaccaacacctctttacagtgaaatgccccaactaaatactaccgtatggcccaccataattacccccatactccttacactattcctcatcacccaactaaaaatattaaacacaaactaccacctacctccctcaccaaagcccataaaaataaaaaattataacaaaccctgagaaccaaaatgaacgaaaatctgttcgcttcattcattgcccccacaatcctaggcctacccgccgcagtactgatcattctatttccccctctattgatccccacctccaaatatctcatcaacaaccgactaatcaccacccaacaatgactaatcaaactaacctcaaaacaaatgataaccatacacaacactaaaggacgaacctgatctcttatactagtatccttaatcatttttattgccacaactaacctcctcggactcctgcctcactcatttacaccaaccacccaactatctataaacctagccatggccatccccttatgagcgggcacagtgattataggctttcgctctaagattaaaaatgccctagcccacttcttaccacaaggcacacctacaccccttatccccatactagttattatcgaaaccatcagcctactcattcaaccaatagccctggccgtacgcctaaccgctaacattactgcaggccacctactcatgcacctaattggaagcgccaccctagcaatatcaaccattaaccttccctctacacttatcatcttcacaattctaattctactgactatcctagaaatcgctgtcgccttaatccaagcctacgttttcacacttctagtaagcctctacctgcacgacaacacataatgacccaccaatcacatgcctatcatatagtaaaacccagcccatgacccctaacaggggccctctcagccctcctaatgacctccggcctagccatgtgatttcacttccactccataacgctcctcatactaggcctactaaccaacacactaaccatataccaatgatggcgcgatgtaacacgagaaagcacataccaaggccaccacacaccacctgtccaaaaaggccttcgatacgggataatcctatttattacctcagaagtttttttcttcgcaggatttttctgagccttttaccactccagcctagcccctaccccccaattaggagggcactggcccccaacaggcatcaccccgctaaatcccctagaagtcccactcctaaacacatccgtattactcgcatcaggagtatcaatcacctgagctcaccatagtctaatagaaaacaaccgaaaccaaataattcaagcactgcttattacaattttactgggtctctattttaccctcctacaagcctcagagtacttcgagtctcccttcaccatttccgacggcatctacggctcaacattttttgtagccacaggcttccacggacttcacgtcattattggctcaactttcctcactatctgcttcatccgccaactaatatttcactttacatccaaacatcactttggcttcgaagccgccgcctgatactggcattttgtagatgtggtttgactatttctgtatgtctccatctattgatgagggtcttactcttttagtataaatagtaccgttaacttccaattaactagttttgacaacattcaaaaaagagtaataaacttcgccttaattttaataatcaacaccctcctagccttactactaataattattacattttgactaccacaactcaacggctacatagaaaaatccaccccttacgagtgcggcttcgaccctatatcccccgcccgcgtccctttctccataaaattcttcttagtagctattaccttcttattatttgatctagaaattgccctccttttacccctaccatgagccctacaaacaactaacctgccactaatagttatgtcatccctcttattaatcatcatcctagccctaagtctggcctatgagtgactacaaaaaggattagactgaaccgaattggtatatagtttaaacaaaacgaatgatttcgactcattaaattatgataatcatatttaccaaatgcccctcatttacataaatattatactagcatttaccatctcacttctaggaatactagtatatcgctcacacctcatatcctccctactatgcctagaaggaataatactatcgctgttcattatagctactctcataaccctcaacacccactccctcttagccaatattgtgcctattgccatactagtctttgccgcctgcgaagcagcggtgggcctagccctactagtctcaatctccaacacatatggcctagactacgtacataacctaaacctactccaatgctaaaactaatcgtcccaacaattatattactaccactgacatgactttccaaaaaacacataatttgaatcaacacaaccacccacagcctaattattagcatcatccctctactattttttaaccaaatcaacaacaacctatttagctgttccccaaccttttcctccgaccccctaacaacccccctcctaatactaactacctgactcctacccctcacaatcatggcaagccaacgccacttatccagtgaaccactatcacgaaaaaaactctacctctctatactaatctccctacaaatctccttaattataacattcacagccacagaactaatcatattttatatcttcttcgaaaccacacttatccccaccttggctatcatcacccgatgaggcaaccagccagaacgcctgaacgcaggcacatacttcctattctacaccctagtaggctcccttcccctactcatcgcactaatttacactcacaacaccctaggctcactaaacattctactactcactctcactgcccaagaactatcaaactcctgagccaacaacttaatatgactagcttacacaatagcttttatagtaaagatacctctttacggactccacttatgactccctaaagcccatgtcgaagcccccatcgctgggtcaatagtacttgccgcagtactcttaaaactaggcggctatggtataatacgcctcacactcattctcaaccccctgacaaaacacatagcctaccccttccttgtactatccctatgaggcataattataacaagctccatctgcctacgacaaacagacctaaaatcgctcattgcatactcttcaatcagccacatagccctcgtagtaacagccattctcatccaaaccccctgaagcttcaccggcgcagtcattctcataatcgcccacgggcttacatcctcattactattctgcctagcaaactcaaactacgaacgcactcacagtcgcatcataatcctctctcaaggacttcaaactctactcccactaatagctttttgatgacttctagcaagcctcgctaacctcgccttaccccccactattaacctactgggagaactctctgtgctagtaaccacgttctcctgatcaaatatcactctcctacttacaggactcaacatactagtcacagccctatactccctctacatatttaccacaacacaatggggctcactcacccaccacattaacaacataaaaccctcattcacacgagaaaacaccctcatgttcatacacctatcccccattctcctcctatccctcaaccccgacatcattaccgggttttcctcttgtaaatatagtttaaccaaaacatcagattgtgaatctgacaacagaggcttacgaccccttatttaccgagaaagctcacaagaactgctaactcatgcccccatgtctaacaacatggctttctcaacttttaaaggataacagctatccattggtcttaggccccaaaaattttggtgcaactccaaataaaagtaataaccatgcacactactataaccaccctaaccctgacttccctaattccccccatccttaccaccctcgttaaccctaacaaaaaaaactcatacccccattatgtaaaatccattgtcgcatccacctttattatcagtctcttccccacaacaatattcatgtgcctagaccaagaagttattatctcgaactgacactgagccacaacccaaacaacccagctctccctaagcttcaaactagactacttctccataatattcatccctgtagcattgttcgttacatggtccatcatagaattctcactgtgatatataaactcagacccaaacattaatcagttcttcaaatatctactcatcttcctaattaccatactaatcttagttaccgctaacaacctattccaactgttcatcggctgagagggcgtaggaattatatccttcttgctcatcagttgatgatacgcccgagcagatgccaacacagcagccattcaagcaatcctatacaaccgtatcggcgatatcggtttcatcctcgccttagcatgatttatcctacactccaactcatgagacccacaacaaatagcccttctaaacgctaatccaagcctcaccccactactaggcctcctcctagcagcagcaggcaaatcagcccaattaggtctccacccctgactcccctcagccatagaaggccccaccccagtctcagccctactccactcaagcactatagttgtagcaggaatcttcttactcatccgcttccaccccctagcagaaaatagcccactaatccaaactctaacactatgcttaggcgctatcaccactctgttcgcagcagtctgcgcccttacacaaaatgacatcaaaaaaatcgtagccttctccacttcaagtcaactaggactcataatagttacaatcggcatcaaccaaccacacctagcattcctgcacatctgtacccacgccttcttcaaagccatactatttatgtgctccgggtccatcatccacaaccttaacaatgaacaagatattcgaaaaataggaggactactcaaaaccatacctctcacttcaacctccctcaccattggcagcctagcattagcaggaatacctttcctcacaggtttctactccaaagaccacatcatcgaaaccgcaaacatatcatacacaaacgcctgagccctatctattactctcatcgctacctccctgacaagcgcctatagcactcgaataattcttctcaccctaacaggtcaacctcgcttccccacccttactaacattaacgaaaataaccccaccctactaaaccccattaaacgcctggcagccggaagcctattcgcaggatttctcattactaacaacatttcccccgcatcccccttccaaacaacaatccccctctacctaaaactcacagccctcgctgtcactttcctaggacttctaacagccctagacctcaactacctaaccaacaaacttaaaataaaatccccactatgcacattttatttctccaacatactcggattctaccctagcatcacacaccgcacaatcccctatctaggccttcttacgagccaaaacctgcccctactcctcctagacctaacctgactagaaaagctattacctaaaacaatttcacagcaccaaatctccacctccatcatcacctcaacccaaaaaggcataattaaactttacttcctctctttcttcttcccactcatcctaaccctactcctaatcacataacctattcccccgagcaatctcaattacaatatatacaccaacaaacaatgttcaaccagtaactactactaatcaacgcccataatcatacaaagcccccgcaccaataggatcctcccgaatcaaccctgacccctctccttcataaattattcagcttcctacactattaaagtttaccacaaccaccaccccatcatactctttcacccacagcaccaatcctacctccatcgctaaccccactaaaacactcaccaagacctcaacccctgacccccatgcctcaggatactcctcaatagccatcgctgtagtatatccaaagacaaccatcattccccctaaataaattaaaaaaactattaaacccatataacctcccccaaaattcagaataataacacacccgaccacaccgctaacaatcaatactaaacccccataaataggagaaggcttagaagaaaaccccacaaaccccattactaaacccacactcaacagaaacaaagcatacatcattattctcgcacggactacaaccacgaccaatgatatgaaaaaccatcgttgtatttcaactacaagaacaccaatgaccccaatacgcaaaactaaccccctaataaaattaattaaccactcattcatcgacctccccaccccatccaacatctccgcatgatgaaacttcggctcactccttggcgcctgcctgatcctccaaatcaccacaggactattcctagccatgcactactcaccagacgcctcaaccgccttttcatcaatcgcccacatcactcgagacgtaaattatggctgaatcatccgctaccttcacgccaatggcgcctcaatattctttatctgcctcttcctacacatcgggcgaggcctatattacggatcatttctctactcagaaacctgaaacatcggcattatcctcctgcttgcaactatagcaacagccttcataggctatgtcctcccgtgaggccaaatatcattctgaggggccacagtaattacaaacttactatccgccatcccatacattgggacagacctagttcaatgaatctgaggaggctactcagtagacagtcccaccctcacacgattctttacctttcacttcatcttgcccttcattattgcagccctagcaacactccacctcctattcttgcacgaaacgggatcaaacaaccccctaggaatcacctcccattccgataaaatcaccttccacccttactacacaatcaaagacgccctcggcttacttctcttccttctctccttaatgacattaacactattctcaccagacctcctaggcgacccagacaattataccctagccaaccccttaaacacccctccccacatcaagcccgaatgatatttcctattcgcctacacaattctccgatccgtccctaacaaactaggaggcgtccttgccctattactatccatcctcatcctagcaataatccccatcctccatatatccaaacaacaaagcataatatttcgcccactaagccaatcactttattgactcctagccgcagacctcctcattctaacctgaatcggaggacaaccagtaagctacccttttaccatcattggacaagtagcatccgtactatacttcacaacaatcctaatcctaataccaactatctccctaattgaaaacaaaatactcaaatgggcctgtccttgtagtataaactaatacaccagtcttgtaaaccggagatgaaaacctttttccaaggacaaatcagagaaaaagtctttaactccaccattagcacccaaagctaagattctaatttaaactattctctgttctttcatggggaagcagatttgggtaccacccaagtattgactcacccatcaacaaccgctatgtatttcgtacattactgccagccaccatgaatattgtacggtaccataaatacttgaccacctgtagtacataaaaacccaatccacatcaaaaccccctccccatgcttacaagcaagtacagcaatcaaccctcaactatcacacatcaactgcaactccaaagccacccctcacccactaggataccaacaaacctacccacccttaacagtacatagtacataaagccatttaccgtacatagcacattacagtcaaatcccttctcgtccccatggatgacccccctcagataggggtcccttgaccaccatcctccgtgaaatcaatatcccgcacaagagtgctactctcctcgctccgggcccataacacttgggggtagctaaagtgaactgtatccgacatctggttcctacttcagggtcataaagcctaaatagcccacacgttccccttaaataagacatcacgatg

SEQ ID NO: 122 - DNA, 16569 bp, Homo sapiens mitochondrial DNA; identical to SEQ ID NO: 121
  insertion (515)..(516): 515.1INS A

SEQ ID NO: 123 - DNA, 16569 bp, Homo sapiens mitochondrial DNA
  insertion (523)..(524): 523.1INS C
gatcacaggtctatcaccctattaaccactcacgggagctctccatgcatttggtattttcgtctggggggtatgcacgcgatagcattgcgagacgctggagccggagcaccctatgtcgcagtatctgtctttgattcctgcctcatcctattatttatcgcacctacgttcaatattacaggcgaacatacttactaaagtgtgttaattaattaatgcttgtaggacataataataacaattgaatgtctgcacagccactttccacacagacatcataacaaaaaatttccaccaaaccccccctcccccgcttctggccacagcacttaaacacatctctgccaaaccccaaaaacaaagaaccctaacaccagcctaaccagatttcaaattttatcttttggcggtatgcacttttaacagtcaccccccaactaacacattattttcccctcccactcccatactactaatctcatcaatacaacccccgcccatcctacccagcacacacacacccgctgctaaccccataccccgaaccaaccaaaccccaaagacaccccccacagtttatgtagcttacctcctcaaagcaatacactgaaaatgtttagacgggctcacatcaccccataaacaaataggtttggtcctagcctttctattagctcttagtaagattacacatgcaagcatccccgttccagtgagttcaccctctaaatcaccacgatcaaaaggaacaagcatcaagcacgcagcaatgcagctcaaaacgcttagcctagccacacccccacgggaaacagcagtgattaacctttagcaataaacgaaagtttaactaagctatactaaccccagggttggtcaatttcgtgccagccaccgcggtcacacgattaacccaagtcaatagaagccggcgtaaagagtgttttagatcaccccctccccaataaagctaaaactcacctgagttgtaaaaaactccagttgacacaaaatagactacgaaagtggctttaacatatctgaacacacaatagctaagacccaaactgggattagataccccactatgcttagccctaaacctcaacagttaaatcaacaaaactgctcgccagaacactacgagccacagcttaaaactcaaaggacctggcggtgcttcatatccctctagaggagcctgttctgtaatcgataaaccccgatcaacctcaccacctcttgctcagcctatataccgccatcttcagcaaaccctgatgaaggctacaaagtaagcgcaagtacccacgtaaagacgttaggtcaaggtgtagcccatgaggtggcaagaaatgggctacattttctaccccagaaaactacgatagcccttatgaaacttaagggtcgaaggtggatttagcagtaaactaagagtagagtgcttagttgaacagggccctgaagcgcgtacacaccgcccgtcaccctcctcaagtatacttcaaaggacatttaactaaaacccctacgcatttatatagaggagacaagtcgtaacatggtaagtgtactggaaagtgcacttggacgaaccagagtgtagcttaacacaaagcacccaacttacacttaggagatttcaacttaacttgaccgctctgagctaaacctagccccaaacccactccaccttactaccagacaaccttagccaaaccatttacccaaataaagtataggcgatagaaattgaaacctggcgcaatagatatagtaccgcaagggaaagatgaaaaattataaccaagcataatatagcaaggactaacccctataccttctgcataatgaattaactagaaataactttgcaaggagagccaaagctaagacccccgaaaccagacgagctacctaagaacagctaaaagagcacacccgtctatgtagcaaaatagtgggaagatttataggtagaggcgacaaacctaccgagcctggtgatagctggttgtccaagatagaatcttagttcaactttaaatttgcccacagaaccctctaaatccccttgtaaatttaactgttagtccaaagaggaacagctctttggacactaggaaaaaaccttgtagagagagtaaaaaatttaacacccatagtaggcctaaaagcagccaccaattaagaaagcgttcaagctcaacacccactacctaaaaaatcccaaacatataactgaactcctcacacccaattggaccaatctatcaccctatagaagaactaatgttagtataagtaacatgaaaacattctcctccgcataagcctgcgtcagattaaaacactgaactgacaattaacagcccaatatctacaatcaaccaacaagtcattattaccctcactgtcaacccaacacaggcatgctcataaggaaaggttaaaaaaagtaaaaggaactcggcaaatcttaccccgcctgtttaccaaaaacatcacctctagcatcaccagtattagaggcaccgcctgcccagtgacacatgtttaacggccgcggtaccctaaccgtgcaaaggtagcataatcacttgttccttaaatagggacctgtatgaatggctccacgagggttcagctgtctcttacttttaaccagtgaaattgacctgcccgtgaagaggcgggcataacacagcaagacgagaagaccctatggagctttaatttattaatgcaaacagtacctaacaaacccacaggtcctaaactaccaaacctgcattaaaaatttcggttggggcgacctcggagcagaacccaacctccgagcagtacatgctaagacttcaccagtcaaagcgaactactatactcaattgatccaataacttgaccaacggaacaagttaccctagggataacagcgcaatcctattctagagtccatatcaacaatagggtttacgacctcgatgttggatcaggacatcccgatggtgcagccgctattaaaggttcgtttgttcaacgattaaagtcctacgtgatctgagttcagaccggagtaatccaggtcggtttctatctacttcaaattcctccctgtacgaaaggacaagagaaataaggcctacttcacaaagcgccttcccccgtaaatgatatcatctcaacttagtattatacccacacccacccaagaacagggtttgttaagatggcagagcccggtaatcgcataaaacttaaaactttacagtcagaggttcaattcctcttcttaacaacatacccatggccaacctcctactcctcattgtacccattctaatcgcaatggcattcctaatgcttaccgaacgaaaaattctaggctatatacaactacgcaaaggccccaacgttgtaggcccctacgggctactacaacccttcgctgacgccataaaactcttcaccaaagagcccctaaaacccgccacatctaccatcaccctctacatcaccgccccgaccttagctctcaccatcgctcttctactatgaacccccctccccatacccaaccccctggtcaacctcaacctaggcctcctatttattctagccacctctagcctagccgtttactcaatcctctgatcagggtgagcatcaaactcaaactacgccctgatcggcgcactgcgagcagtagcccaaacaatctcatatgaagtcaccctagccatcattctactatcaacattactaataagtggctcctttaacctctccacccttatcacaacacaagaacacctctgattactcctgccatcatgacccttggccataatatgatttatctccacactagcagagaccaaccgaacccccttcgaccttgccgaaggggagtccgaactagtctcaggcttcaacatcgaatacgccgcaggccccttcgccctattcttcatagccgaatacacaaacattattataataaacaccctcaccactacaatcttcctaggaacaacatatgacgcactctcccctgaactctacacaacatattttgtcaccaagaccctacttctaacctccctgttcttatgaattcgaacagcatacccccgattccgctacgaccaactcatacacctcctatgaaaaaacttcctaccactcaccctagcattacttatatgatatgtctccatacccattacaatctccagcattccccctcaaacctaagaaatatgtctgataaaagagttactttgatagagtaaataataggagcttaaacccccttatttctaggactatgagaatcgaacccatccctgagaatccaaaattctccgtgccacctatcacaccccatcctaaagtaaggtcagctaaataagctatcgggcccataccccgaaaatgttggttatacccttcccgtactaattaatcccctggcccaacccgtcatctactctaccatctttgcaggcacactcatcacagcgctaagctcgcactgattttttacctgagtaggcctagaaataaacatgctagcttttattccagttctaaccaaaaaaataaaccctcgttccacagaagctgccatcaagtatttcctcacgcaagcaaccgcatccataatccttctaatagctatcctcttcaacaatatactctccggacaatgaaccataaccaatactaccaatcaatactcatcattaataatcataatagctatagcaataaaactaggaatagccccctttcacttctgagtcccagaggttacccaaggcacccctctgacatccggcctgcttcttctcacatgacaaaaactagcccccatctcaatcatataccaaatctctccctcactaaacgtaagccttctcctcactctctcaatcttatccatcatagcaggcagttgaggtggattaaaccaaacccagctacgcaaaatcttagcatactcctcaattacccacataggatgaataatagcagttctaccgtacaaccctaacataaccattcttaatttaactatttatattatcctaactactaccgcattcctactactcaacttaaactccagcaccacgaccctactactatctcgcacctgaaacaagctaacatgactaacacccttaattccatccaccctcctctccctaggaggcctgcccccgctaaccggctttttgcccaaatgggccattatcgaagaattcacaaaaaacaatagcctcatcatccccaccatcatagccaccatcaccctccttaacctctacttctacctacgcctaatctactccacctcaatcacactactccccatatctaacaacgtaaaaataaaatgacagtttgaacatacaaaacccaccccattcctccccacactcatcgcccttaccacgctactcctacctatctccccttttatactaataatcttatagaaatttaggttaaatacagaccaagagccttcaaagccctcagtaagttgcaatacttaatttctgtaacagctaaggactgcaaaaccccactctgcatcaactgaacgcaaatcagccactttaattaagctaagcccttactagaccaatgggacttaaacccacaaacacttagttaacagctaagcaccctaatcaactggcttcaatctacttctcccgccgccgggaaaaaaggcgggagaagccccggcaggtttgaagctgcttcttcgaatttgcaattcaatatgaaaatcacctcggagctggtaaaaagaggcctaacccctgtctttagatttacagtccaatgcttcactcagccattttacctcacccccactgatgttcgccgaccgttgactattctctacaaaccacaaagacattggaacactatacctattattcggcgcatgagctggagtcctaggcacagctctaagcctccttattcgagccgagctgggccagccaggcaaccttctaggtaacgaccacatctacaacgttatcgtcacagcccatgcatttgtaataatcttcttcatagtaatacccatcataatcggaggctttggcaactgactagttcccctaataatcggtgcccccgatatggcgtttccccgcataaacaacataagcttctgactcttacctccctctctcctactcctgctcgcatctgctatagtggaggccggagcaggaacaggttgaacagtctaccctcccttagcagggaactactcccaccctggagcctccgtagacctaaccatcttctccttacacctagcaggtgtctcctctatcttaggggccatcaatttcatcacaacaattatcaatataaaaccccctgccataacccaataccaaacgcccctcttcgtctgatccgtcctaatcacagcagtcctacttctcctatctctcccagtcctagctgctggcatcactatactactaacagaccgcaacctcaacaccaccttcttcgaccccgccggaggaggagaccccattctataccaacacctattctgatttttcggtcaccctgaagtttatattcttatcctaccaggcttcggaataatctcccatattgtaacttactactccggaaaaaaagaaccatttggatacataggtatggtctgagctatgatatcaattggcttcctagggtttatcgtgtgagcacaccatatatttacagtaggaatagacgtagacacacgagcatatttcacctccgctaccataatcatcgctatccccaccggcgtcaaagtatttagctgactcgccacactccacggaagcaatatgaaatgatctgctgcagtgctctgagccctaggattcatctttcttttcaccgtaggtggcctgactggcattgtattagcaaactcatcactagacatcgtactacacgacacgtactacgttgtagcccacttccactatgtcctatcaataggagctgtatttgccatcataggaggcttcattcactgatttcccctattctcaggctacaccctagaccaaacctacgccaaaatccatttcactatcatattcatcggcgtaaatctaactttcttcccacaacactttctcggcctatccggaatgccccgacgttactcggactaccccgatgcatacaccacatgaaacatcctatcatctgtaggctcattcatttctctaacagcagtaatattaataattttcatgatttgagaagccttcgcttcgaagcgaaaagtcctaatagtagaagaaccctccataaacctggagtgactatatggatgccccccaccctaccacacattcgaagaacccgtatacataaaatctagacaaaaaaggaaggaatcgaaccccccaaagctggtttcaagccaaccccatggcctccatgactttttcaaaaaggtattagaaaaaccatttcataactttgtcaaagttaaattataggctaaatcctatatatcttaatggcacatgcagcgcaagtaggtctacaagacgctacttcccctatcatagaagagcttatcacctttcatgatcacgccctcataatcattttccttatctgcttcctagtcctgtatgcccttttcctaacactcacaacaaaactaactaatactaacatctcagacgctcaggaaatagaaaccgtctgaactatcctgcccgccatcatcctagtcctcatcgccctcccatccctacgcatcctttacataacagacgaggtcaacgatccctcccttaccatcaaatcaattggccaccaatggtactgaacctacgagtacaccgactacggcggactaatcttcaactcctacatacttcccccattattcctagaaccaggcgacctgcgactccttgacgttgacaatcgagtagtactcccgattgaagcccccattcgtataataattacatcacaagacgtcttgcactcatgagctgtccccacattaggcttaaaaacagatgcaattcccggacgtctaaaccaaaccactttcaccgctacacgaccgggggtatactacggtcaatgctctgaaatctgtggagcaaaccacagtttcatgcccatcgtcctagaattaattcccctaaaaatctttgaaatagggcccgtatttaccctatagcaccccctctaccccctctagagcccactgtaaagctaacttagcattaaccttttaagttaaagattaagagaaccaacacctctttacagtgaaatgccccaactaaatactaccgtatggcccaccataattacccccatactccttacactattcctcatcacccaactaaaaatattaaacacaaactaccacctacctccctcaccaaagcccataaaaataaaaaattataacaaaccctgagaaccaaaatgaacgaaaatctgttcgcttcattcattgcccccacaatcctaggcctacccgccgcagtactgatcattctatttccccctctattgatccccacctccaaatatctcatcaacaaccgactaatcaccacccaacaatgactaatcaaactaacctcaaaacaaatgataaccatacacaacactaaaggacgaacctgatctcttatactagtatccttaatcatttttattgccacaactaacctcctcggactcctgcctcactcatttacaccaaccacccaactatctataaacctagccatggccatccccttatgagcgggcacagtgattataggctttcgctctaagattaaaaatgccctagcccacttcttaccacaaggcacacctacaccccttatccccatactagttattatcgaaaccatcagcctactcattcaaccaatagccctggccgtacgcctaaccgctaacattactgcaggccacctactcatgcacctaattggaagcgccaccctagcaatatcaaccattaaccttccctctacacttatcatcttcacaattctaattctactgactatcctagaaatcgctgtcgccttaatccaagcctacgttttcacacttctagtaagcctctacctgcacgacaacacataatgacccaccaatcacatgcctatcatatagtaaaacccagcccatgacccctaacaggggccctctcagccctcctaatgacctccggcctagccatgtgatttcacttccactccataacgctcctcatactaggcctactaaccaacacactaaccatataccaatgatggcgcgatgtaacacgagaaagcacataccaaggccaccacacaccacctgtccaaaaaggccttcgatacgggataatcctatttattacctcagaagtttttttcttcgcaggatttttctgagccttttaccactccagcctagcccctaccccccaattaggagggcactggcccccaacaggcatcaccccgctaaatcccctagaagtcccactcctaaacacatccgtattactcgcatcaggagtatcaatcacctgagctcaccatagtctaatagaaaacaaccgaaaccaaataattcaagcactgcttattacaattttactgggtctctattttaccctcctacaagcctcagagtacttcgagtctcccttcaccatttccgacggcatctacggctcaacattttttgtagccacaggcttccacggacttcacgtcattattggctcaactttcctcactatctgcttcatccgccaactaatatttcactttacatccaaacatcactttggcttcgaagccgccgcctgatactggcattttgtagatgtggtttgactatttctgtatgtctccatctattgatgagggtcttactcttttagtataaatagtaccgttaacttccaattaactagttttgacaacattcaaaaaagagtaataaacttcgccttaattttaataatcaacaccctcctagccttactactaataattattacattttgactaccacaactcaacggctacatagaaaaatccaccccttacgagtgcggcttcgaccctatatcccccgcccgcgtccctttctccataaaattcttcttagtagctattaccttcttattatttgatctagaaattgccctccttttacccctaccatgagccctacaaacaactaacctgccactaatagttatgtcatccctcttattaatcatcatcctagccctaagtctggcctatgagtgactacaaaaaggattagactgaaccgaattggtatatagtttaaacaaaacgaatgatttcgactcattaaattatgataatcatatttaccaaatgcccctcatttacataaatattatactagcatttaccatctcacttctaggaatactagtatatcgctcacacctcatatcctccctactatgcctagaaggaataatactatcgctgttcattatagctactctcataaccctcaacacccactccctcttagccaatattgtgcctattgccatactagtctttgccgcctgcgaagcagcggtgggcctagccctactagtctcaatctccaacacatatggcctagactacgtacataacctaaacctactccaatgctaaaactaatcgtcccaacaattatattactaccactgacatgactttccaaaaaacacataatttgaatcaacacaaccacccacagcctaattattagcatcatccctctactattttttaaccaaatcaacaacaacctatttagctgttccccaaccttttcctccgaccccctaacaacccccctcctaatactaactacctgactcctacccctcacaatcatggcaagccaacgccacttatccagtgaaccactatcacgaaaaaaactctacctctctatactaatctccctacaaatctccttaattataacattcacagccacagaactaatcatattttatatcttcttcgaaaccacacttatccccaccttggctatcatcacccgatgaggcaaccagccagaacgcctgaacgcaggcacatacttcctattctacaccctagtaggctcccttcccctactcatcgcactaatttacactcacaacaccctaggctcactaaacattctactactcactctcactgcccaagaactatcaaactcctgagccaacaacttaatatgactagcttacacaatagcttttatagtaaagatacctctttacggactccacttatgactccctaaagcccatgtcgaagcccccatcgctgggtcaatagtacttgccgcagtactcttaaaactaggcggctatggtataatacgcctcacactcattctcaaccccctgacaaaacacatagcctaccccttccttgtactatccctatgaggcataattataacaagctccatctgcctacgacaaacagacctaaaatcgctcattgcatactcttcaatcagccacatagccctcgtagtaacagccattctcatccaaaccccctgaagcttcaccggcgcagtcattctcataatcgcccacgggcttacatcctcattactattctgcctagcaaactcaaactacgaacgcactcacagtcgcatcataatcctctctcaaggacttcaaactctactcccactaatagctttttgatgacttctagcaagcctcgctaacctcgccttaccccccactattaacctactgggagaactctctgtgctagtaaccacgttctcctgatcaaatatcactctcctacttacaggactcaacatactagtcacagccctatactccctctacatatttaccacaacacaatggggctcactcacccaccacattaacaacataaaaccctcattcacacgagaaaacaccctcatgttcatacacctatcccccattctcctcctatccctcaaccccgacatcattaccgggttttcctcttgtaaatatagtttaaccaaaacatcagattgtgaatctgacaacagaggcttacgaccccttatttaccgagaaagctcacaagaactgctaactcatgcccccatgtctaacaacatggctttctcaacttttaaaggataacagctatccattggtcttaggccccaaaaattttggtgcaactccaaataaaagtaataaccatgcacactactataaccaccctaaccctgacttccctaattccccccatccttaccaccctcgttaaccctaacaaaaaaaactcatacccccattatgtaaaatccattgtcgcatccacctttattatcagtctcttccccacaacaatattcatgtgcctagaccaagaagttattatctcgaactgacactgagccacaacccaaacaacccagctctccctaagcttcaaactagactacttctccataatattcatccctgtagcattgttcgttacatggtccatcatagaattctcactgtgatatataaactcagacccaaacattaatcagttcttcaaatatctactcatcttcctaattaccatactaatcttagttaccgctaacaacctattccaactgttcatcggctgagagggcgtaggaattatatccttcttgctcatcagttgatgatacgcccgagcagatgccaacacagcagccattcaagcaatcctatacaaccgtatcggcgatatcggtttcatcctcgccttagcatgatttatcctacactccaactcatgagacccacaacaaatagcccttctaaacgctaatccaagcctcaccccactactaggcctcctcctagcagcagcaggcaaatcagcccaattaggtctccacccctgactcccctcagccatagaaggccccaccccagtctcagccctactccactcaagcactatagttgtagcaggaatcttcttactcatccgcttccaccccctagcagaaaatagcccactaatccaaactctaacactatgcttaggcgctatcaccactctgttcgcagcagtctgcgcccttacacaaaatgacatcaaaaaaatcgtagccttctccacttcaagtcaactaggactcataatagttacaatcggcatcaaccaaccacacctagcattcctgcacatctgtacccacgccttcttcaaagccatactatttatgtgctccgggtccatcatccacaaccttaacaatgaacaagatattcgaaaaataggaggactactcaaaaccatacctctcacttcaacctccctcaccattggcagcctagcattagcaggaatacctttcctcacaggtttctactccaaagaccacatcatcgaaaccgcaaacatatcatacacaaacgcctgagccctatctattactctcatcgctacctccctgacaagcgcctatagcactcgaataattcttctcaccctaacaggtcaacctcgcttccccacccttactaacattaacgaaaataaccccaccctactaaaccccattaaacgcctggcagccggaagcctattcgcaggatttctcattactaacaacatttcccccgcatcccccttccaaacaacaatccccctctacctaaaactcacagccctcgctgtcactttcctaggacttctaacagccctagacctcaactacctaaccaacaaacttaaaataaaatccccactatgcacattttatttctccaacatactcggattctaccctagcatcacacaccgcacaatcccctatctaggccttcttacgagccaaaacctgcccctactcctcctagacctaacctgactagaaaagctattacctaaaacaatttcacagcaccaaatctccacctccatcatcacctcaacccaaaaaggcataattaaactttacttcctctctttcttcttcccactcatcctaaccctactcctaatcacataacctattcccccgagcaatctcaattacaatatatacaccaacaaacaatgttcaaccagtaactactactaatcaacgcccataatcatacaaagcccccgcaccaataggatcctcccgaatcaaccctgacccctctccttcataaattattcagcttcctacactattaaagtttaccacaaccaccaccccatcatactctttcacccacagcaccaatcctacctccatcgctaaccccactaaaacactcaccaagacctcaacccctgacccccatgcctcaggatactcctcaatagccatcgctgtagtatatccaaagacaaccatcattccccctaaataaattaaaaaaactattaaacccatataacctcccccaaaattcagaataataacacacccgaccacaccgctaacaatcaatactaaacccccataaataggagaaggcttagaagaaaaccccacaaaccccattactaaacccacactcaacagaaacaaagcatacatcattattctcgcacggactacaaccacgaccaatgatatgaaaaaccatcgttgtatttcaactacaagaacaccaatgaccccaatacgcaaaactaaccccctaataaaattaattaaccactcattcatcgacctccccaccccatccaacatctccgcatgatgaaacttcggctcactccttggcgcctgcctgatcctccaaatcaccacaggactattcctagccatgcactactcaccagacgcctcaaccgccttttcatcaatcgcccacatcactcgagacgtaaattatggctgaatcatccgctaccttcacgccaatggcgcctcaatattctttatctgcctcttcctacacatcgggcgaggcctatattacggatcatttctctactcagaaacctgaaacatcggcattatcctcctgcttgcaactatagcaacagccttcataggctatgtcctcccgtgaggccaaatatcattctgaggggccacagtaattacaaacttactatccgccatcccatacattgggacagacctagttcaatgaatctgaggaggctactcagtagacagtcccaccctcacacgattctttacctttcacttcatcttgcccttcattattgcagccctagcaacactccacctcctattcttgcacgaaacgggatcaaacaaccccctaggaatcacctcccattccgataaaatcaccttccacccttactacacaatcaaagacgccctcggcttacttctcttccttctctccttaatgacattaacactattctcaccagacctcctaggcgacccagacaattataccctagccaaccccttaaacacccctccccacatcaagcccgaatgatatttcctattcgcctacacaattctccgatccgtccctaacaaactaggaggcgtccttgccctattactatccatcctcatcctagcaataatccccatcctccatatatccaaacaacaaagcataatatttcgcccactaagccaatcactttattgactcctagccgcagacctcctcattctaacctgaatcggaggacaaccagtaagctacccttttaccatcattggacaagtagcatccgtactatacttcacaacaatcctaatcctaataccaactatctccctaattgaaaacaaaatactcaaatgggcctgtccttgtagtataaactaatacaccagtcttgtaaaccggagatgaaaacctttttccaaggacaaatcagagaaaaagtctttaactccaccattagcacccaaagctaagattctaatttaaactattctctgttctttcatggggaagcagatttgggtaccacccaagtattgactcacccatcaacaaccgctatgtatttcgtacattactgccagccaccatgaatattgtacggtaccataaatacttgaccacctgtagtacataaaaacccaatccacatcaaaaccccctccccatgcttacaagcaagtacagcaatcaaccctcaactatcacacatcaactgcaactccaaagccacccctcacccactaggataccaacaaacctacccacccttaacagtacatagtacataaagccatttaccgtacatagcacattacagtcaaatcccttctcgtccccatggatgacccccctcagataggggtcccttgaccaccatcctccgtgaaatcaatatcccgcacaagagtgctactctcctcgctccgggcccataacacttgggggtagctaaagtgaactgtatccgacatctggttcctacttcagggtcataaagcctaaatagcccacacgttccccttaaataagacatcacgatg

SEQ ID NO: 124 - DNA, 16570 bp, Homo sapiens mitochondrial DNA
  insertion (523)..(524): 523.1INS CA
gatcacaggtctatcaccctattaaccactcacgggagctctccatgcatttggtattttcgtctggggggtatgcacgcgatagcattgcgagacgctggagccggagcaccctatgtcgcagtatctgtctttgattcctgcctcatcctattatttatcgcacctacgttcaatattacaggcgaacatacttactaaagtgtgttaattaattaatgcttgtaggacataataataacaattgaatgtctgcacagccactttccacacagacatcataacaaaaaatttccaccaaaccccccctcccccgcttctggccacagcacttaaacacatctctgccaaaccccaaaaacaaagaaccctaacaccagcctaaccagatttcaaattttatcttttggcggtatgcacttttaacagtcaccccccaactaacacattattttcccctcccactcccatactactaatctcatcaatacaacccccgcccatcctacccagcacacacacacaccgctgctaaccccataccccgaaccaaccaaaccccaaagacaccccccacagtttatgtagcttacctcctcaaagcaatacactgaaaatgtttagacgggctcacatcaccccataaacaaataggtttggtcctagcctttctattagctcttagtaagattacacatgcaagcatccccgttccagtgagttcaccctctaaatcaccacgatcaaaaggaacaagcatcaagcacgcagcaatgcagctcaaaacgcttagcctagccacacccccacgggaaacagcagtgattaacctttagcaataaacgaaagtttaactaagctatactaaccccagggttggtcaatttcgtgccagccaccgcggtcacacgattaacccaagtcaatagaagccggcgtaaagagtgttttagatcaccccctccccaataaagctaaaactcacctgagttgtaaaaaactccagttgacacaaaatagactacgaaagtggctttaacatatctgaacacacaatagctaagacccaaactgggattagataccccactatgcttagccctaaacctcaacagttaaatcaacaaaactgctcgccagaacactacgagccacagcttaaaactcaaaggacctggcggtgcttcatatccctctagaggagcctgttctgtaatcgataaaccccgatcaacctcaccacctcttgctcagcctatataccgccatcttcagcaaaccctgatgaaggctacaaagtaagcgcaagtacccacgtaaagacgttaggtcaaggtgtagcccatgaggtggcaagaaatgggctacattttctaccccagaaaactacgatagcccttatgaaacttaagggtcgaaggtggatttagcagtaaactaagagtagagtgcttagttgaacagggccctgaagcgcgtacacaccgcccgtcaccctcctcaagtatacttcaaaggacatttaactaaaacccctacgcatttatatagaggagacaagtcgtaacatggtaagtgtactggaaagtgcacttggacgaaccagagtgtagcttaacacaaagcacccaacttacacttaggagatttcaacttaacttgaccgctctgagctaaacctagccccaaacccactccaccttactaccagacaaccttagccaaaccatttacccaaataaagtataggcgatagaaattgaaacctggcgcaatagatatagtaccgcaagggaaagatgaaaaattataaccaagcataatatagcaaggactaacccctataccttctgcataatgaattaactagaaataactttgcaaggagagccaaagctaagacccccgaaaccagacgagctacctaagaacagctaaaagagcacacccgtctatgtagcaaaatagtgggaagatttataggtagaggcgacaaacctaccgagcctggtgatagctggttgtccaagatagaatcttagttcaactttaaatttgcccacagaaccctctaaatccccttgtaaatttaactgttagtccaaagaggaacagctctttggacactaggaaaaaaccttgtagagagagtaaaaaatttaacacccatagtaggcctaaaagcagccaccaattaagaaagcgttcaagctcaacacccactacctaaaaaatcccaaacatataactgaactcctcacacccaattggaccaatctatcaccctatagaagaactaatgttagtataagtaacatgaaaacattctcctccgcataagcctgcgtcagattaaaacactgaactgacaattaacagcccaatatctacaatcaaccaacaagtcattattaccctcactgtcaacccaacacaggcatgctcataaggaaaggttaaaaaaagtaaaaggaactcggcaaatcttaccccgcctgtttaccaaaaacatcacctctagcatcaccagtattagaggcaccgcctgcccagtgacacatgtttaacggccgcggtaccctaaccgtgcaaaggtagcataatcacttgttccttaaatagggacctgtatgaatggctccacgagggttcagctgtctcttacttttaaccagtgaaattgacctgcccgtgaagaggcgggcataacacagcaagacgagaagaccctatggagctttaatttattaatgcaaacagtacctaacaaacccacaggtcctaaactaccaaacctgcattaaaaatttcggttggggcgacctcggagcagaacccaacctccgagcagtacatgctaagacttcaccagtcaaagcgaactactatactcaattgatccaataacttgaccaacggaacaagttaccctagggataacagcgcaatcctattctagagtccatatcaacaatagggtttacgacctcgatgttggatcaggacatcccgatggtgcagccgctattaaaggttcgtttgttcaacgattaaagtcctacgtgatctgagttcagaccggagtaatccaggtcggtttctatctacttcaaattcctccctgtacgaaaggacaagagaaataaggcctacttcacaaagcgccttcccccgtaaatgatatcatctcaacttagtattatacccacacccacccaagaacagggtttgttaagatggcagagcccggtaatcgcataaaacttaaaactttacagtcagaggttcaattcctcttcttaacaacatacccatggccaacctcctactcctcattgtacccattctaatcgcaatggcattcctaatgcttaccgaacgaaaaattctaggctatatacaactacgcaaaggccccaacgttgtaggcccctacgggctactacaacccttcgctgacgccataaaactcttcaccaaagagcccctaaaacccgccacatctaccatcaccctctacatcaccgccccgaccttagctctcaccatcgctcttctactatgaacccccctccccatacccaaccccctggtcaacctcaacctaggcctcctatttattctagccacctctagcctagccgtttactcaatcctctgatcagggtgagcatcaaactcaaactacgccctgatcggcgcactgcgagcagtagcccaaacaatctcatatgaagtcaccctagccatcattctactatcaacattactaataagtggctcctttaacctctccacccttatcacaacacaagaacacctctgattactcctgccatcatgacccttggccataatatgatttatctccacactagcagagaccaaccgaacccccttcgaccttgccgaaggggagtccgaactagtctcaggcttcaacatcgaatacgccgcaggccccttcgccctattcttcatagccgaatacacaaacattattataataaacaccctcaccactacaatcttcctaggaacaacatatgacgcactctcccctgaactctacacaacatattttgtcaccaagaccctacttctaacctccctgttcttatgaattcgaacagcatacccccgattccgctacgaccaactcatacacctcctatgaaaaaacttcctaccactcaccctagcattacttatatgatatgtctccatacccattacaatctccagcattccccctcaaacctaagaaatatgtctgataaaagagttactttgatagagtaaataataggagcttaaacccccttatttctaggactatgagaatcgaacccatccctgagaatccaaaattctccgtgccacctatcacaccccatcctaaagtaaggtcagctaaataagctatcgggcccataccccgaaaatgttggttatacccttcccgtactaattaatcccctggcccaacccgtcatctactctaccatctttgcaggcacactcatcacagcgctaagctcgcactgattttttacctgagtaggcctagaaataaacatgctagcttttattccagttctaaccaaaaaaataaaccctcgttccacagaagctgccatcaagtatttcctcacgcaagcaaccgcatccataatccttctaatagctatcctcttcaacaatatactctccggacaatgaaccataaccaatactaccaatcaatactcatcattaataatcataatagctatagcaataaaactaggaatagccccctttcacttctgagtcccagaggttacccaaggcacccctctgacatccggcctgcttcttctcacatgacaaaaactagcccccatctcaatcatataccaaatctctccctcactaaacgtaagccttctcctcactctctcaatcttatccatcatagcaggcagttgaggtggattaaaccaaacccagctacgcaaaatcttagcatactcctcaattacccacataggatgaataatagcagttctaccgtacaaccctaacataaccattcttaatttaactatttatattatcctaactactaccgcattcctactactcaacttaaactccagcaccacgaccctactactatctcgcacctgaaacaagctaacatgactaacacccttaattccatccaccctcctctccctaggaggcctgcccccgctaaccggctttttgcccaaatgggccattatcgaagaattcacaaaaaacaatagcctcatcatccccaccatcatagccaccatcaccctccttaacctctacttctacctacgcctaatctactccacctcaatcacactactccccatatctaacaacgtaaaaataaaatgacagtttgaacatacaaaacccaccccattcctccccacactcatcgcccttaccacgctactcctacctatctccccttttatactaataatcttatagaaatttaggttaaatacagaccaagagccttcaaagccctcagtaagttgcaatacttaatttctgtaacagctaaggactgcaaaaccccactctgcatcaactgaacgcaaatcagccactttaattaagctaagcccttactagaccaatgggacttaaacccacaaacacttagttaacagctaagcaccctaatcaactggcttcaatctacttctcccgccgccgggaaaaaaggcgggagaagccccggcaggtttgaagctgcttcttcgaatttgcaattcaatatgaaaatcacctcggagctggtaaaaagaggcctaacccctgtctttagatttacagtccaatgcttcactcagccattttacctcacccccactgatgttcgccgaccgttgactattctctacaaaccacaaagacattggaacactatacctattattcggcgcatgagctggagtcctaggcacagctctaagcctccttattcgagccgagctgggccagccaggcaaccttctaggtaacgaccacatctacaacgttatcgtcacagcccatgcatttgtaataatcttcttcatagtaatacccatcataatcggaggctttggcaactgactagttcccctaataatcggtgcccccgatatggcgtttccccgcataaacaacataagcttctgactcttacctccctctctcctactcctgctcgcatctgctatagtggaggccggagcaggaacaggttgaacagtctaccctcccttagcagggaactactcccaccctggagcctccgtagacctaaccatcttctccttacacctagcaggtgtctcctctatcttaggggccatcaatttcatcacaacaattatcaatataaaaccccctgccataacccaataccaaacgcccctcttcgtctgatccgtcctaatcacagcagtcctacttctcctatctctcccagtcctagctgctggcatcactatactactaacagaccgcaacctcaacaccaccttcttcgaccccgccggaggaggagaccccattctataccaacacctattctgatttttcggtcaccctgaagtttatattcttatcctaccaggcttcggaataatctcccatattgtaacttactactccggaaaaaaagaaccatttggatacataggtatggtctgagctatgatatcaattggcttcctagggtttatcgtgtgagcacaccatatatttacagtaggaatagacgtagacacacgagcatatttcacctccgctaccataatcatcgctatccccaccggcgtcaaagtatttagctgactcgccacactccacggaagcaatatgaaatgatctgctgcagtgctctgagccctaggattcatctttcttttcaccgtaggtggcctgactggcattgtattagcaaactcatcactagacatcgtactacacgacacgtactacgttgtagcccacttccactatgtcctatcaataggagctgtatttgccatcataggaggcttcattcactgatttcccctattctcaggctacaccctagaccaaacctacgccaaaatccatttcactatcatattcatcggcgtaaatctaactttcttcccacaacactttctcggcctatccggaatgccccgacgttactcggactaccccgatgcatacaccacatgaaacatcctatcatctgtaggctcattcatttctctaacagcagtaatattaataattttcatgatttgagaagccttcgcttcgaagcgaaaagtcctaatagtagaagaaccctccataaacctggagtgactatatggatgccccccaccctaccacacattcgaagaacccgtatacataaaatctagacaaaaaaggaaggaatcgaaccccccaaagctggtttcaagccaaccccatggcctccatgactttttcaaaaaggtattagaaaaaccatttcataactttgtcaaagttaaattataggctaaatcctatatatcttaatggcacatgcagcgcaagtaggtctacaagacgctacttcccctatcatagaagagcttatcacctttcatgatcacgccctcataatcattttccttatctgcttcctagtcctgtatgcccttttcctaacactcacaacaaaactaactaatactaacatctcagacgctcaggaaatagaaaccgtctgaactatcctgcccgccatcatcctagtcctcatcgccctcccatccctacgcatcctttacataacagacgaggtcaacgatccctcccttaccatcaaatcaattggccaccaatggtactgaacctacgagtacaccgactacggcggactaatcttcaactcctacatacttcccccattattcctagaaccaggcgacctgcgactccttgacgttgacaatcgagtagtactcccgattgaagcccccattcgtataataattacatcacaagacgtcttgcactcatgagctgtccccacattaggcttaaaaacagatgcaattcccggacgtctaaaccaaaccactttcaccgctacacgaccgggggtatactacggtcaatgctctgaaatctgtggagcaaaccacagtttcatgcccatcgtcctagaattaattcccctaaaaatctttgaaatagggcccgtatttaccctatagcaccccctctaccccctctagagcccactgtaaagctaacttagcattaaccttttaagttaaagattaagagaaccaacacctctttacagtgaaatgccccaactaaatactaccgtatggcccaccataattacccccatactccttacactattcctcatcacccaactaaaaatattaaacacaaactaccacctacctccctcaccaaagcccataaaaataaaaaattataacaaaccctgagaaccaaaatgaacgaaaatctgttcgcttcattcattgcccccacaatcctaggcctacccgccgcagtactgatcattctatttccccctctattgatccccacctccaaatatctcatcaacaaccgactaatcaccacccaacaatgactaatcaaactaacctcaaaacaaatgataaccatacacaacactaaaggacgaacctgatctcttatactagtatccttaatcatttttattgccacaactaacctcctcggactcctgcctcactcatttacaccaaccacccaactatctataaacctagccatggccatccccttatgagcgggcacagtgattataggctttcgctctaagattaaaaatgccctagcccacttcttaccacaaggcacacctacaccccttatccccatactagttattatcgaaaccatcagcctactcattcaaccaatagccctggccgtacgcctaaccgctaacattactgcaggccacctactcatgcacctaattggaagcgccaccctagcaatatcaaccattaaccttccctctacacttatcatcttcacaattctaattctactgactatcctagaaatcgctgtcgccttaatccaagcctacgttttcacacttctagtaagcctctacctgcacgacaacacataatgacccaccaatcacatgcctatcatatagtaaaacccagcccatgacccctaacaggggccctctcagccctcctaatgacctccggcctagccatgtgatttcacttccactccataacgctcctcatactaggcctactaaccaacacactaaccatataccaatgatggcgcgatgtaacacgagaaagcacataccaaggccaccacacaccacctgtccaaaaaggccttcgatacgggataatcctatttattacctcagaagtttttttcttcgcaggatttttctgagccttttaccactccagcctagcccctaccccccaattaggagggcactggcccccaacaggcatcaccccgctaaatcccctagaagtcccactcctaaacacatccgtattactcgcatcaggagtatcaatcacctgagctcaccatagtctaatagaaaacaaccgaaaccaaataattcaagcactgcttattacaattttactgggtctctattttaccctcctacaagcctcagagtacttcgagtctcccttcaccatttccgacggcatctacggctcaacattttttgtagccacaggcttccacggacttcacgtcattattggctcaactttcctcactatctgcttcatccgccaactaatatttcactttacatccaaacatcactttggcttcgaagccgccgcctgatactggcattttgtagatgtggtttgactatttctgtatgtctccatctattgatgagggtcttactcttttagtataaatagtaccgttaacttccaattaactagttttgacaacattcaaaaaagagtaataaacttcgccttaattttaataatcaacaccctcctagccttactactaataattattacattttgactaccacaactcaacggctacatagaaaaatccaccccttacgagtgcggcttcgaccctatatcccccgcccgcgtccctttctccataaaattcttcttagtagctattaccttcttattatttgatctagaaattgccctccttttacccctaccatgagccctacaaacaactaacctgccactaatagttatgtcatccctcttattaatcatcatcctagccctaagtctggcctatgagtgactacaaaaaggattagactgaaccgaattggtatatagtttaaacaaaacgaatgatttcgactcattaaattatgataatcatatttaccaaatgcccctcatttacataaatattatactagcatttaccatctcacttctaggaatactagtatatcgctcacacctcatatcctccctactatgcctagaaggaataatactatcgctgttcattatagctactctcataaccctcaacacccactccctcttagccaatattgtgcctattgccatactagtctttgccgcctgcgaagcagcggtgggcctagccctactagtctcaatctccaacacatatggcctagactacgtacataacctaaacctactccaatgctaaaactaatcgtcccaacaattatattactaccactgacatgactttccaaaaaacacataatttgaatcaacacaaccacccacagcctaattattagcatcatccctctactattttttaaccaaatcaacaacaacctatttagctgttccccaaccttttcctccgaccccctaacaacccccctcctaatactaactacctgactcctacccctcacaatcatggcaagccaacgccacttatccagtgaaccactatcacgaaaaaaactctacctctctatactaatctccctacaaatctccttaattataacattcacagccacagaactaatcatattttatatcttcttcgaaaccacacttatccccaccttggctatcatcacccgatgaggcaaccagccagaacgcctgaacgcaggcacatacttcctattctacaccctagtaggctcccttcccctactcatcgcactaatttacactcacaacaccctaggctcactaaacattctactactcactctcactgcccaagaactatcaaactcctgagccaacaacttaatatgactagcttacacaatagcttttatagtaaagatacctctttacggactccacttatgactccctaaagcccatgtcgaagcccccatcgctgggtcaatagtacttgccgcagtactcttaaaactaggcggctatggtataatacgcctcacactcattctcaaccccctgacaaaacacatagcctaccccttccttgtactatccctatgaggcataattataacaagctccatctgcctacgacaaacagacctaaaatcgctcattgcatactcttcaatcagccacatagccctcgtagtaacagccattctcatccaaaccccctgaagcttcaccggcgcagtcattctcataatcgcccacgggcttacatcctcattactattctgcctagcaaactcaaactacgaacgcactcacagtcgcatcataatcctctctcaaggacttcaaactctactcccactaatagctttttgatgacttctagcaagcctcgctaacctcgccttaccccccactattaacctactgggagaactctctgtgctagtaaccacgttctcctgatcaaatatcactctcctacttacaggactcaacatactagtcacagccctatactccctctacatatttaccacaacacaatggggctcactcacccaccacattaacaacataaaaccctcattcacacgagaaaacaccctcatgttcatacacctatcccccattctcctcctatccctcaaccccgacatcattaccgggttttcctcttgtaaatatagtttaaccaaaacatcagattgtgaatctgacaacagaggcttacgaccccttatttaccgagaaagctcacaagaactgctaactcatgcccccatgtctaacaacatggctttctcaacttttaaaggataacagctatccattggtcttaggccccaaaaattttggtgcaactccaaataaaagtaataaccatgcacactactataaccaccctaaccctgacttccctaattccccccatccttaccaccctcgttaaccctaacaaaaaaaactcatacccccattatgtaaaatccattgtcgcatccacctttattatcagtctcttccccacaacaatattcatgtgcctagaccaagaagttattatctcgaactgacactgagccacaacccaaacaacccagctctccctaagcttcaaactagactacttctccataatattcatccctgtagcattgttcgttacatggtccatcatagaattctcactgtgatatataaactcagacccaaacattaatcagttcttcaaatatctactcatcttcctaattaccatactaatcttagttaccgctaacaacctattccaactgttcatcggctgagagggcgtaggaattatatccttcttgctcatcagttgatgatacgcccgagcagatgccaacacagcagccattcaagcaatcctatacaaccgtatcggcgatatcggtttcatcctcgccttagcatgatttatcctacactccaactcatgagacccacaacaaatagcccttctaaacgctaatccaagcctcaccccactactaggcctcctcctagcagcagcaggcaaatcagcccaattaggtctccacccctgactcccctcagccatagaaggccccaccccagtctcagccctactccactcaagcactatagttgtagcaggaatcttcttactcatccgcttccaccccctagcagaaaatagcccactaatccaaactctaacactatgcttaggcgctatcaccactctgttcgcagcagtctgcgcccttacacaaaatgacatcaaaaaaatcgtagccttctccacttcaagtcaactaggactcataatagttacaatcggcatcaaccaaccacacctagcattcctgcacatctgtacccacgccttcttcaaagccatactatttatgtgctccgggtccatcatccacaaccttaacaatgaacaagatattcgaaaaataggaggactactcaaaaccatacctctcacttcaacctccctcaccattggcagcctagcattagcaggaatacctttcctcacaggtttctactccaaagaccacatcatcgaaaccgcaaacatatcatacacaaacgcctgagccctatctattactctcatcgctacctccctgacaagcgcctatagcactcgaataattcttctcaccctaacaggtcaacctcgcttccccacccttactaacattaacgaaaataaccccaccctactaaaccccattaaacgcctggcagccggaagcctattcgcaggatttctcattactaacaacatttcccccgcatcccccttccaaacaacaatccccctctacctaaaactcacagccctcgctgtcactttcctaggacttctaacagccctagacctcaactacctaaccaacaaacttaaaataaaatccccactatgcacattttatttctccaacatactcggattctaccctagcatcacacaccgcacaatcccctatctaggccttcttacgagccaaaacctgcccctactcctcctagacctaacctgactagaaaagctattacctaaaacaatttcacagcaccaaatctccacctccatcatcacctcaacccaaaaaggcataattaaactttacttcctctctttcttcttcccactcatcctaaccctactcctaatcacataacctattcccccgagcaatctcaattacaatatatacaccaacaaacaatgttcaaccagtaactactactaatcaacgcccataatcatacaaagcccccgcaccaataggatcctcccgaatcaaccctgacccctctccttcataaattattcagcttcctacactattaaagtttaccacaaccaccaccccatcatactctttcacccacagcaccaatcctacctccatcgctaaccccactaaaacactcaccaagacctcaacccctgacccccatgcctcaggatactcctcaatagccatcgctgtagtatatccaaagacaaccatcattccccctaaataaattaaaaaaactattaaacccatataacctcccccaaaattcagaataataacacacccgaccacaccgctaacaatcaatactaaacccccataaataggagaaggcttagaagaaaaccccacaaaccccattactaaacccacactcaacagaaacaaagcatacatcattattctcgcacggactacaaccacgaccaatgatatgaaaaaccatcgttgtatttcaactacaagaacaccaatgaccccaatacgcaaaactaaccccctaataaaattaattaaccactcattcatcgacctccccaccccatccaacatctccgcatgatgaaacttcggctcactccttggcgcctgcctgatcctccaaatcaccacaggactattcctagccatgcactactcaccagacgcctcaaccgccttttcatcaatcgcccacatcactcgagacgtaaattatggctgaatcatccgctaccttcacgccaatggcgcctcaatattctttatctgcctcttcctacacatcgggcgaggcctatattacggatcatttctctactcagaaacctgaaacatcggcattatcctcctgcttgcaactatagcaacagccttcataggctatgtcctcccgtgaggccaaatatcattctgaggggccacagtaattacaaacttactatccgccatcccatacattgggacagacctagttcaatgaatctgaggaggctactcagtagacagtcccaccctcacacgattctttacctttcacttcatcttgcccttcattattgcagccctagcaacactccacctcctattcttgcacgaaacgggatcaaacaaccccctaggaatcacctcccattccgataaaatcaccttccacccttactacacaatcaaagacgccctcggcttacttctcttccttctctccttaatgacattaacactattctcaccagacctcctaggcgacccagacaattataccctagccaaccccttaaacacccctccccacatcaagcccgaatgatatttcctattcgcctacacaattctccgatccgtccctaacaaactaggaggcgtccttgccctattactatccatcctcatcctagcaataatccccatcctccatatatccaaacaacaaagcataatatttcgcccactaagccaatcactttattgactcctagccgcagacctcctcattctaacctgaatcggaggacaaccagtaagctacccttttaccatcattggacaagtagcatccgtactatacttcacaacaatcctaatcctaataccaactatctccctaattgaaaacaaaatactcaaatgggcctgtccttgtagtataaactaatacaccagtcttgtaaaccggagatgaaaacctttttccaaggacaaatcagagaaaaagtctttaactccaccattagcacccaaagctaagattctaatttaaactattctctgttctttcatggggaagcagatttgggtaccacccaagtattgactcacccatcaacaaccgctatgtatttcgtacattactgccagccaccatgaatattgtacggtaccataaatacttgaccacctgtagtacataaaaacccaatccacatcaaaaccccctccccatgcttacaagcaagtacagcaatcaaccctcaactatcacacatcaactgcaactccaaagccacccctcacccactaggataccaacaaacctacccacccttaacagtacatagtacataaagccatttaccgtacatagcacattacagtcaaatcccttctcgtccccatggatgacccccctcagataggggtcccttgaccaccatcctccgtgaaatcaatatcccgcacaagagtgctactctcctcgctccgggcccataacacttgggggtagctaaagtgaactgtatccgacatctggttcctacttcagggtcataaagcctaaatagcccacacgttccccttaaataagacatcacgatg

SEQ ID NO: 125 - DNA, 16571 bp, Homo sapiens mitochondrial DNA
  insertion (523)..(524): 523.1INS CAC
gatcacaggtctatcaccctattaaccactcacgggagctctccatgcatttggtattttcgtctggggggtatgcacgcgatagcattgcgagacgctggagccggagcaccctatgtcgcagtatctgtctttgattcctgcctcatcctattatttatcgcacctacgttcaatattacaggcgaacatacttactaaagtgtgttaattaattaatgcttgtaggacataataataacaattgaatgtctgcacagccactttccacacagacatcataacaaaaaatttccaccaaaccccccctcccccgcttctggccacagcacttaaacacatctctgccaaaccccaaaaacaaagaaccctaacaccagcctaaccagatttcaaattttatcttttggcggtatgcacttttaacagtcaccccccaactaacacattattttcccctcccactcccatactactaatctcatcaatacaacccccgcccatcctacccagcacacacacacacccgctgctaaccccataccccgaaccaaccaaaccccaaagacaccccccacagtttatgtagcttacctcctcaaagcaatacactgaaaatgtttagacgggctcacatcaccccataaacaaataggtttggtcctagcctttctattagctcttagtaagattacacatgcaagcatccccgttccagtgagttcaccctctaaatcaccacgatcaaaaggaacaagcatcaagcacgcagcaatgcagctcaaaacgcttagcctagccacacccccacgggaaacagcagtgattaacctttagcaataaacgaaagtttaactaagctatactaaccccagggttggtcaatttcgtgccagccaccgcggtcacacgattaacccaagtcaatagaagccggcgtaaagagtgttttagatcaccccctccccaataaagctaaaactcacctgagttgtaaaaaactccagttgacacaaaatagactacgaaagtggctttaacatatctgaacacacaatagctaagacccaaactgggattagataccccactatgcttagccctaaacctcaacagttaaatcaacaaaactgctcgccagaacactacgagccacagcttaaaactcaaaggacctggcggtgcttcatatccctctagaggagcctgttctgtaatcgataaaccccgatcaacctcaccacctcttgctcagcctatataccgccatcttcagcaaaccctgatgaaggctacaaagtaagcgcaagtacccacgtaaagacgttaggtcaaggtgtagcccatgaggtggcaagaaatgggctacattttctaccccagaaaactacgatagcccttatgaaacttaagggtcgaaggtggatttagcagtaaactaagagtagagtgcttagttgaacagggccctgaagcgcgtacacaccgcccgtcaccctcctcaagtatacttcaaaggacatttaactaaaacccctacgcatttatatagaggagacaagtcgtaacatggtaagtgtactggaaagtgcacttggacgaaccagagtgtagcttaacacaaagcacccaacttacacttaggagatttcaacttaacttgaccgctctgagctaaacctagccccaaacccactccaccttactaccagacaaccttagccaaaccatttacccaaataaagtataggcgatagaaattgaaacctggcgcaatagatatagtaccgcaagggaaagatgaaaaattataaccaagcataatatagcaaggactaacccctataccttctgcataatgaattaactagaaataactttgcaaggagagccaaagctaagacccccgaaaccagacgagctacctaagaacagctaaaagagcacacccgtctatgtagcaaaatagtgggaagatttataggtagaggcgacaaacctaccgagcctggtgatagctggttgtccaagatagaatcttagttcaactttaaatttgcccacagaaccctctaaatccccttgtaaatttaactgttagtccaaagaggaacagctctttggacactaggaaaaaaccttgtagagagagtaaaaaatttaacacccatagtaggcctaaaagcagccaccaattaagaaagcgttcaagctcaacacccactacctaaaaaatcccaaacatataactgaactcctcacacccaattggaccaatctatcaccctatagaagaactaatgttagtataagtaacatgaaaacattctcctccgcataagcctgcgtcagattaaaacactgaactgacaattaacagcccaatatctacaatcaaccaacaagtcattattaccctcactgtcaacccaacacaggcatgctcataaggaaaggttaaaaaaagtaaaaggaactcggcaaatcttaccccgcctgtttaccaaaaacatcacctctagcatcaccagtattagaggcaccgcctgcccagtgacacatgtttaacggccgcggtaccctaaccgtgcaaaggtagcataatcacttgttccttaaatagggacctgtatgaatggctccacgagggttcagctgtctcttacttttaaccagtgaaattgacctgcccgtgaagaggcgggcataacacagcaagacgagaagaccctatggagctttaatttattaatgcaaacagtacctaacaaacccacaggtcctaaactaccaaacctgcattaaaaatttcggttggggcgacctcggagcagaacccaacctccgagcagtacatgctaagacttcaccagtcaaagcgaactactatactcaattgatccaataacttgaccaacggaacaagttaccctagggataacagcgcaatcctattctagagtccatatcaacaatagggtttacgacctcgatgttggatcaggacatcccgatggtgcagccgctattaaaggttcgtttgttcaacgattaaagtcctacgtgatctgagttcagaccggagtaatccaggtcggtttctatctacttcaaattcctccctgtacgaaaggacaagagaaataaggcctacttcacaaagcgccttcccccgtaaatgatatcatctcaacttagtattatacccacacccacccaagaacagggtttgttaagatggcagagcccggtaatcgcataaaacttaaaactttacagtcagaggttcaattcctcttcttaacaacatacccatggccaacctcctactcctcattgtacccattctaatcgcaatggcattcctaatgcttaccgaacgaaaaattctaggctatatacaactacgcaaaggccccaacgttgtaggcccctacgggctactacaacccttcgctgacgccataaaactcttcaccaaagagcccctaaaacccgccacatctaccatcaccctctacatcaccgccccgaccttagctctcaccatcgctcttctactatgaacccccctccccatacccaaccccctggtcaacctcaacctaggcctcctatttattctagccacctctagcctagccgtttactcaatcctctgatcagggtgagcatcaaactcaaactacgccctgatcggcgcactgcgagcagtagcccaaacaatctcatatgaagtcaccctagccatcattctactatcaacattactaataagtggctcctttaacctctccacccttatcacaacacaagaacacctctgattactcctgccatcatgacccttggccataatatgatttatctccacactagcagagaccaaccgaacccccttcgaccttgccgaaggggagtccgaactagtctcaggcttcaacatcgaatacgccgcaggccccttcgccctattcttcatagccgaatacacaaacattattataataaacaccctcaccactacaatcttcctaggaacaacatatgacgcactctcccctgaactctacacaacatattttgtcaccaagaccctacttctaacctccctgttcttatgaattcgaacagcatacccccgattccgctacgaccaactcatacacctcctatgaaaaaacttcctaccactcaccctagcattacttatatgatatgtctccatacccattacaatctccagcattccccctcaaacctaagaaatatgtctgataaaagagttactttgatagagtaaataataggagcttaaacccccttatttctaggactatgagaatcgaacccatccctgagaatccaaaattctccgtgccacctatcacaccccatcctaaagtaaggtcagctaaataagctatcgggcccataccccgaaaatgttggttatacccttcccgtactaattaatcccctggcccaacccgtcatctactctaccatctttgcaggcacactcatcacagcgctaagctcgcactgattttttacctgagtaggcctagaaataaacatgctagcttttattccagttctaaccaaaaaaataaaccctcgttccacagaagctgccatcaagtatttcctcacgcaagcaaccgcatccataatccttctaatagctatcctcttcaacaatatactctccggacaatgaaccataaccaatactaccaatcaatactcatcattaataatcataatagctatagcaataaaactaggaatagccccctttcacttctgagtcccagaggttacccaaggcacccctctgacatccggcctgcttcttctcacatgacaaaaactagcccccatctcaatcatataccaaatctctccctcactaaacgtaagccttctcctcactctctcaatcttatccatcatagcaggcagttgaggtggattaaaccaaacccagctacgcaaaatcttagcatactcctcaattacccacataggatgaataatagcagttctaccgtacaaccctaacataaccattcttaatttaactatttatattatcctaactactaccgcattcctactactcaacttaaactccagcaccacgaccctactactatctcgcacctgaaacaagctaacatgactaacacccttaattccatccaccctcctctccctaggaggcctgcccccgctaaccggctttttgcccaaatgggccattatcgaagaattcacaaaaaacaatagcctcatcatccccaccatcatagccaccatcaccctccttaacctctacttctacctacgcctaatctactccacctcaatcacactactccccatatctaacaacgtaaaaataaaatgacagtttgaacatacaaaacccaccccattcctccccacactcatcgcccttaccacgctactcctacctatctccccttttatactaataatcttatagaaatttaggttaaatacagaccaagagccttcaaagccctcagtaagttgcaatacttaatttctgtaacagctaaggactgcaaaaccccactctgcatcaactgaacgcaaatcagccactttaattaagctaagcccttactagaccaatgggacttaaacccacaaacacttagttaacagctaagcaccctaatcaactggcttcaatctacttctcccgccgccgggaaaaaaggcgggagaagccccggcaggtttgaagctgcttcttcgaatttgcaattcaatatgaaaatcacctcggagctggtaaaaagaggcctaacccctgtctttagatttacagtccaatgcttcactcagccattttacctcacccccactgatgttcgccgaccgttgactattctctacaaaccacaaagacattggaacactatacctattattcggcgcatgagctggagtcctaggcacagctctaagcctccttattcgagccgagctgggccagccaggcaaccttctaggtaacgaccacatctacaacgttatcgtcacagcccatgcatttgtaataatcttcttcatagtaatacccatcataatcggaggctttggcaactgactagttcccctaataatcggtgcccccgatatggcgtttccccgcataaacaacataagcttctgactcttacctccctctctcctactcctgctcgcatctgctatagtggaggccggagcaggaacaggttgaacagtctaccctcccttagcagggaactactcccaccctggagcctccgtagacctaaccatcttctccttacacctagcaggtgtctcctctatcttaggggccatcaatttcatcacaacaattatcaatataaaaccccctgccataacccaataccaaacgcccctcttcgtctgatccgtcctaatcacagcagtcctacttctcctatctctcccagtcctagctgctggcatcactatactactaacagaccgcaacctcaacaccaccttcttcgaccccgccggaggaggagaccccattctataccaacacctattctgatttttcggtcaccctgaagtttatattcttatcctaccaggcttcggaataatctcccatattgtaacttactactccggaaaaaaagaaccatttggatacataggtatggtctgagctatgatatcaattggcttcctagggtttatcgtgtgagcacaccatatatttacagtaggaatagacgtagacacacgagcatatttcacctccgctaccataatcatcgctatccccaccggcgtcaaagtatttagctgactcgccacactccacggaagcaatatgaaatgatctgctgcagtgctctgagccctaggattcatctttcttttcaccgtaggtggcctgactggcattgtattagcaaactcatcactagacatcgtactacacgacacgtactacgttgtagcccacttccactatgtcctatcaataggagctgtatttgccatcataggaggcttcattcactgatttcccctattctcaggctacaccctagaccaaacctacgccaaaatccatttcactatcatattcatcggcgtaaatctaactttcttcccacaacactttctcggcctatccggaatgccccgacgttactcggactaccccgatgcatacaccacatgaaacatcctatcatctgtaggctcattcatttctctaacagcagtaatattaataattttcatgatttgagaagccttcgcttcgaagcgaaaagtcctaatagtagaagaaccctccataaacctggagtgactatatggatgccccccaccctaccacacattcgaagaacccgtatacataaaatctagacaaaaaaggaaggaatcgaaccccccaaagctggtttcaagccaaccccatggcctccatgactttttcaaaaaggtattagaaaaaccatttcataactttgtcaaagttaaattataggctaaatcctatatatcttaatggcacatgcagcgcaagtaggtctacaagacgctacttcccctatcatagaagagcttatcacctttcatgatcacgccctcataatcattttccttatctgcttcctagtcctgtatgcccttttcctaacactcacaacaaaactaactaatactaacatctcagacgctcaggaaatagaaaccgtctgaactatcctgcccgccatcatcctagtcctcatcgccctcccatccctacgcatcctttacataacagacgaggtcaacgatccctcccttaccatcaaatcaattggccaccaatggtactgaacctacgagtacaccgactacggcggactaatcttcaactcctacatacttcccccattattcctagaaccaggcgacctgcgactccttgacgttgacaatcgagtagtactcccgattgaagcccccattcgtataataattacatcacaagacgtcttgcactcatgagctgtccccacattaggcttaaaaacagatgcaattcccggacgtctaaaccaaaccactttcaccgctacacgaccgggggtatactacggtcaatgctctgaaatctgtggagcaaaccacagtttcatgcccatcgtcctagaattaattcccctaaaaatctttgaaatagggcccgtatttaccctatagcaccccctctaccccctctagagcccactgtaaagctaacttagcattaaccttttaagttaaagattaagagaaccaacacctctttacagtgaaatgccccaactaaatactaccgtatggcccaccataattacccccatactccttacactattcctcatcacccaactaaaaatattaaacacaaactaccacctacctccctcaccaaagcccataaaaataaaaaattataacaaaccctgagaaccaaaatgaacgaaaatctgttcgcttcattcattgcccccacaatcctaggcctacccgccgcagtactgatcattctatttccccctctattgatccccacctccaaatatctcatcaacaaccgactaatcaccacccaacaatgactaatcaaactaacctcaaaacaaatgataaccatacacaacactaaaggacgaacctgatctcttatactagtatccttaatcatttttattgccacaactaacctcctcggactcctgcctcactcatttacaccaaccacccaactatctataaacctagccatggccatccccttatgagcgggcacagtgattataggctttcgctctaagattaaaaatgccctagcccacttcttaccacaaggcacacctacaccccttatccccatactagttattatcgaaaccatcagcctactcattcaaccaatagccctggccgtacgcctaaccgctaacattactgcaggccacctactcatgcacctaattggaagcgccaccctagcaatatcaaccattaaccttccctctacacttatcatcttcacaattctaattctactgactatcctagaaatcgctgtcgccttaatccaagcctacgttttcacacttctagtaagcctctacctgcacgacaacacataatgacccaccaatcacatgcctatcatatagtaaaacccagcccatgacccctaacaggggccctctcagccctcctaatgacctccggcctagccatgtgatttcacttccactccataacgctcctcatactaggcctactaaccaacacactaaccatataccaatgatggcgcgatgtaacacgagaaagcacataccaaggccaccacacaccacctgtccaaaaaggccttcgatacgggataatcctatttattacctcagaagtttttttcttcgcaggatttttctgagccttttaccactccagcctagcccctaccccccaattaggagggcactggcccccaacaggcatcaccccgctaaatcccctagaagtcccactcctaaacacatccgtattactcgcatcaggagtatcaatcacctgagctcaccatagtctaatagaaaacaaccgaaaccaaataattcaagcactgcttattacaattttactgggtctctattttaccctcctacaagcctcagagtacttcgagtctcccttcaccatttccgacggcatctacggctcaacattttttgtagccacaggcttccacggacttcacgtcattattggctcaactttcctcactatctgcttcatccgccaactaatatttcactttacatccaaacatcactttggcttcgaagccgccgcctgatactggcattttgtagatgtggtttgactatttctgtatgtctccatctattgatgagggtcttactcttttagtataaatagtaccgttaacttccaattaactagttttgacaacattcaaaaaagagtaataaacttcgccttaattttaataatcaacaccctcctagccttactactaataattattacattttgactaccacaactcaacggctacatagaaaaatccaccccttacgagtgcggcttcgaccctatatcccccgcccgcgtccctttctccataaaattcttcttagtagctattaccttcttattatttgatctagaaattgccctccttttacccctaccatgagccctacaaacaactaacctgccactaatagttatgtcatccctcttattaatcatcatcctagccctaagtctggcctatgagtgactacaaaaaggattagactgaaccgaattggtatatagtttaaacaaaacgaatgatttcgactcattaaattatgataatcatatttaccaaatgcccctcatttacataaatattatactagcatttaccatctcacttctaggaatactagtatatcgctcacacctcatatcctccctactatgcctagaaggaataatactatcgctgttcattatagctactctcataaccctcaacacccactccctcttagccaatattgtgcctattgccatactagtctttgccgcctgcgaagcagcggtgggcctagccctactagtctcaatctccaacacatatggcctagactacgtacataacctaaacctactccaatgctaaaactaatcgtcccaacaattatattactaccactgacatgactttccaaaaaacacataatttgaatcaacacaaccacccacagcctaattattagcatcatccctctactattttttaaccaaatcaacaacaacctatttagctgttccccaaccttttcctccgaccccctaacaacccccctcctaatactaactacctgactcctacccctcacaatcatggcaagccaacgccacttatccagtgaaccactatcacgaaaaaaactctacctctctatactaatctccctacaaatctccttaattataacattcacagccacagaactaatcatattttatatcttcttcgaaaccacacttatccccaccttggctatcatcacccgatgaggcaaccagccagaacgcctgaacgcaggcacatacttcctattctacaccctagtaggctcccttcccctactcatcgcactaatttacactcacaacaccctaggctcactaaacattctactactcactctcactgcccaagaactatcaaactcctgagccaacaacttaatatgactagcttacacaatagcttttatagtaaagatacctctttacggactccacttatgactccctaaagcccatgtcgaagcccccatcgctgggtcaatagtacttgccgcagtactcttaaaactaggcggctatggtataatacgcctcacactcattctcaaccccctgacaaaacacatagcctaccccttccttgtactatccctatgaggcataattataacaagctccatctgcctacgacaaacagacctaaaatcgctcattgcatactcttcaatcagccacatagccctcgtagtaacagccattctcatccaaaccccctgaagcttcaccggcgcagtcattctcataatcgcccacgggcttacatcctcattactattctgcctagcaaactcaaactacgaacgcactcacagtcgcatcataatcctctctcaaggacttcaaactctactcccactaatagctttttgatgacttctagcaagcctcgctaacctcgccttaccccccactattaacctactgggagaactctctgtgctagtaaccacgttctcctgatcaaatatcactctcctacttacaggactcaacatactagtcacagccctatactccctctacatatttaccacaacacaatggggctcactcacccaccacattaacaacataaaaccctcattcacacgagaaaacaccctcatgttcatacacctatcccccattctcctcctatccctcaaccccgacatcattaccgggttttcctcttgtaaatatagtttaaccaaaacatcagattgtgaatctgacaacagaggcttacgaccccttatttaccgagaaagctcacaagaactgctaactcatgcccccatgtctaacaacatggctttctcaacttttaaaggataacagctatccattggtcttaggccccaaaaattttggtgcaactccaaataaaagtaataaccatgcacactactataaccaccctaaccctgacttccctaattccccccatccttaccaccctcgttaaccctaacaaaaaaaactcatacccccattatgtaaaatccattgtcgcatccacctttattatcagtctcttccccacaacaatattcatgtgcctagaccaagaagttattatctcgaactgacactgagccacaacccaaacaacccagctctccctaagcttcaaactagactacttctccataatattcatccctgtagcattgttcgttacatggtccatcatagaattctcactgtgatatataaactcagacccaaacattaatcagttcttcaaatatctactcatcttcctaattaccatactaatcttagttaccgctaacaacctattccaactgttcatcggctgagagggcgtaggaattatatccttcttgctcatcagttgatgatacgcccgagcagatgccaacacagcagccattcaagcaatcctatacaaccgtatcggcgatatcggtttcatcctcgccttagcatgatttatcctacactccaactcatgagacccacaacaaatagcccttctaaacgctaatccaagcctcaccccactactaggcctcctcctagcagcagcaggcaaatcagcccaattaggtctccacccctgactcccctcagccatagaaggccccaccccagtctcagccctactccactcaagcactatagttgtagcaggaatcttcttactcatccgcttccaccccctagcagaaaatagcccactaatccaaactctaacactatgcttaggcgctatcaccactctgttcgcagcagtctgcgcccttacacaaaatgacatcaaaaaaatcgtagccttctccacttcaagtcaactaggactcataatagttacaatcggcatcaaccaaccacacctagcattcctgcacatctgtacccacgccttcttcaaagccatactatttatgtgctccgggtccatcatccacaaccttaacaatgaacaagatattcgaaaaataggaggactactcaaaaccatacctctcacttcaacctccctcaccattggcagcctagcattagcaggaatacctttcctcacaggtttctactccaaagaccacatcatcgaaaccgcaaacatatcatacacaaacgcctgagccctatctattactctcatcgctacctccctgacaagcgcctatagcactcgaataattcttctcaccctaacaggtcaacctcgcttccccacccttactaacattaacgaaaataaccccaccctactaaaccccattaaacgcctggcagccggaagcctattcgcaggatttctcattactaacaacatttcccccgcatcccccttccaaacaacaatccccctctacctaaaactcacagccctcgctgtcactttcctaggacttctaacagccctagacctcaactacctaaccaacaaacttaaaataaaatccccactatgcacattttatttctccaacatactcggattctaccctagcatcacacaccgcacaatcccctatctaggccttcttacgagccaaaacctgcccctactcctcctagacctaacctgactagaaaagctattacctaaaacaatttcacagcaccaaatctccacctccatcatcacctcaacccaaaaaggcataattaaactttacttcctctctttcttcttcccactcatcctaaccctactcctaatcacataacctattcccccgagcaatctcaattacaatatatacaccaacaaacaatgttcaaccagtaactactactaatcaacgcccataatcatacaaagcccccgcaccaataggatcctcccgaatcaaccctgacccctctccttcataaattattcagcttcctacactattaaagtttaccacaaccaccaccccatcatactctttcacccacagcaccaatcctacctccatcgctaaccccactaaaacactcaccaagacctcaacccctgacccccatgcctcaggatactcctcaatagccatcgctgtagtatatccaaagacaaccatcattccccctaaataaattaaaaaaactattaaacccatataacctcccccaaaattcagaataataacacacccgaccacaccgctaacaatcaatactaaacccccataaataggagaaggcttagaagaaaaccccacaaaccccattactaaacccacactcaacagaaacaaagcatacatcattattctcgcacggactacaaccacgaccaatgatatgaaaaaccatcgttgtatttcaactacaagaacaccaatgaccccaatacgcaaaactaaccccctaataaaattaattaaccactcattcatcgacctccccaccccatccaacatctccgcatgatgaaacttcggctcactccttggcgcctgcctgatcctccaaatcaccacaggactattcctagccatgcactactcaccagacgcctcaaccgccttttcatcaatcgcccacatcactcgagacgtaaattatggctgaatcatccgctaccttcacgccaatggcgcctcaatattctttatctgcctcttcctacacatcgggcgaggcctatattacggatcatttctctactcagaaacctgaaacatcggcattatcctcctgcttgcaactatagcaacagccttcataggctatgtcctcccgtgaggccaaatatcattctgaggggccacagtaattacaaacttactatccgccatcccatacattgggacagacctagttcaatgaatctgaggaggctactcagtagacagtcccaccctcacacgattctttacctttcacttcatcttgcccttcattattgcagccctagcaacactccacctcctattcttgcacgaaacgggatcaaacaaccccctaggaatcacctcccattccgataaaatcaccttccacccttactacacaatcaaagacgccctcggcttacttctcttccttctctccttaatgacattaacactattctcaccagacctcctaggcgacccagacaattataccctagccaaccccttaaacacccctccccacatcaagcccgaatgatatttcctattcgcctacacaattctccgatccgtccctaacaaactaggaggcgtccttgccctattactatccatcctcatcctagcaataatccccatcctccatatatccaaacaacaaagcataatatttcgcccactaagccaatcactttattgactcctagccgcagacctcctcattctaacctgaatcggaggacaaccagtaagctacccttttaccatcattggacaagtagcatccgtactatacttcacaacaatcctaatcctaataccaactatctccctaattgaaaacaaaatactcaaatgggcctgtccttgtagtataaactaatacaccagtcttgtaaaccggagatgaaaacctttttccaaggacaaatcagagaaaaagtctttaactccaccattagcacccaaagctaagattctaatttaaactattctctgttctttcatggggaagcagatttgggtaccacccaagtattgactcacccatcaacaaccgctatgtatttcgtacattactgccagccaccatgaatattgtacggtaccataaatacttgaccacctgtagtacataaaaacccaatccacatcaaaaccccctccccatgcttacaagcaagtacagcaatcaaccctcaactatcacacatcaactgcaactccaaagccacccctcacccactaggataccaacaaacctacccacccttaacagtacatagtacataaagccatttaccgtacatagcacattacagtcaaatcccttctcgtccccatggatgacccccctcagataggggtcccttgaccaccatcctccgtgaaatcaatatcccgcacaagagtgctactctcctcgctccgggcccataacacttgggggtagctaaagtgaactgtatccgacatctggttcctacttcagggtcataaagcctaaatagcccacacgttccccttaaataagacatcacgatg

SEQ ID NO: 126 - DNA, 16572 bp, Homo sapiens mitochondrial DNA
  insertion (523)..(524): 523.1INS CACA
gatcacaggtctatcaccctattaaccactcacgggagctctccatgcatttggtattttcgtctggggggtatgcacgcgatagcattgcgagacgctggagccggagcaccctatgtcgcagtatctgtctttgattcctgcctcatcctattatttatcgcacctacgttcaatattacaggcgaacatacttactaaagtgtgttaattaattaatgcttgtaggacataataataacaattgaatgtctgcacagccactttccacacagacatcataacaaaaaatttccaccaaaccccccctcccccgcttctggccacagcacttaaacacatctctgccaaaccccaaaaacaaagaaccctaacaccagcctaaccagatttcaaattttatcttttggcggtatgcacttttaacagtcaccccccaactaacacattattttcccctcccactcccatactactaatctcatcaatacaacccccgcccatcctacccagcacacacacacacaccgctgctaaccccataccccgaaccaaccaaaccccaaagacaccccccacagtttatgtagcttacctcctcaaagcaatacactgaaaatgtttagacgggctcacatcaccccataaacaaataggtttggtcctagcctttctattagctcttagtaagattacacatgcaagcatccccgttccagtgagttcaccctctaaatcaccacgatcaaaaggaacaagcatcaagcacgcagcaatgcagctcaaaacgcttagcctagccacacccccacgggaaacagcagtgattaacctttagcaataaacgaaagtttaactaagctatactaaccccagggttggtcaatttcgtgccagccaccgcggtcacacgattaacccaagtcaatagaagccggcgtaaagagtgttttagatcaccccctccccaataaagctaaaactcacctgagttgtaaaaaactccagttgacacaaaatagactacgaaagtggctttaacatatctgaacacacaatagctaagacccaaactgggattagataccccactatgcttagccctaaacctcaacagttaaatcaacaaaactgctcgccagaacactacgagccacagcttaaaactcaaaggacctggcggtgcttcatatccctctagaggagcctgttctgtaatcgataaaccccgatcaacctcaccacctcttgctcagcctatataccgccatcttcagcaaaccctgatgaaggctacaaagtaagcgcaagtacccacgtaaagacgttaggtcaaggtgtagcccatgaggtggcaagaaatgggctacattttctaccccagaaaactacgatagcccttatgaaacttaagggtcgaaggtggatttagcagtaaactaagagtagagtgcttagttgaacagggccctgaagcgcgtacacaccgcccgtcaccctcctcaagtatacttcaaaggacatttaactaaaacccctacgcatttatatagaggagacaagtcgtaacatggtaagtgtactggaaagtgcacttggacgaaccagagtgtagcttaacacaaagcacccaacttacacttaggagatttcaacttaacttgaccgctctgagctaaacctagccccaaacccactccaccttactaccagacaaccttagccaaaccatttacccaaataaagtataggcgatagaaattgaaacctggcgcaatagatatagtaccgcaagggaaagatgaaaaattataaccaagcataatatagcaaggactaacccctataccttctgcataatgaattaactagaaataactttgcaaggagagccaaagctaagacccccgaaaccagacgagctacctaagaacagctaaaagagcacacccgtctatgtagcaaaatagtgggaagatttataggtagaggcgacaaacctaccgagcctggtgatagctggttgtccaagatagaatcttagttcaactttaaatttgcccacagaaccctctaaatccccttgtaaatttaactgttagtccaaagaggaacagctctttggacactaggaaaaaaccttgtagagagagtaaaaaatttaacacccatagtaggcctaaaagcagccaccaattaagaaagcgttcaagctcaacacccactacctaaaaaatcccaaacatataactgaactcctcacacccaattggaccaatctatcaccctatagaagaactaatgttagtataagtaacatgaaaacattctcctccgcataagcctgcgtcagattaaaacactgaactgacaattaacagcccaatatctacaatcaaccaacaagtcattattaccctcactgtcaacccaacacaggcatgctcataaggaaaggttaaaaaaagtaaaaggaactcggcaaatcttaccccgcctgtttaccaaaaacatcacctctagcatcaccagtattagaggcaccgcctgcccagtgacacatgtttaacggccgcggtaccctaaccgtgcaaaggtagcataatcacttgttccttaaatagggacctgtatgaatggctccacgagggttcagctgtctcttacttttaaccagtgaaattgacctgcccgtgaagaggcgggcataacacagcaagacgagaagaccctatggagctttaatttattaatgcaaacagtacctaacaaacccacaggtcctaaactaccaaacctgcattaaaaatttcggttggggcgacctcggagcagaacccaacctccgagcagtacatgctaagacttcaccagtcaaagcgaactactatactcaattgatccaataacttgaccaacggaacaagttaccctagggataacagcgcaatcctattctagagtccatatcaacaatagggtttacgacctcgatgttggatcaggacatcccgatggtgcagccgctattaaaggttcgtttgttcaacgattaaagtcctacgtgatctgagttcagaccggagtaatccaggtcggtttctatctacttcaaattcctccctgtacgaaaggacaagagaaataaggcctacttcacaaagcgccttcccccgtaaatgatatcatctcaacttagtattatacccacacccacccaagaacagggtttgttaagatggcagagcccggtaatcgcataaaacttaaaactttacagtcagaggttcaattcctcttcttaacaacatacccatggccaacctcctactcctcattgtacccattctaatcgcaatggcattcctaatgcttaccgaacgaaaaattctaggctatatacaactacgcaaaggccccaacgttgtaggcccctacgggctactacaacccttcgctgacgccataaaactcttcaccaaagagcccctaaaacccgccacatctaccatcaccctctacatcaccgccccgaccttagctctcaccatcgctcttctactatgaacccccctccccatacccaaccccctggtcaacctcaacctaggcctcctatttattctagccacctctagcctagccgtttactcaatcctctgatcagggtgagcatcaaactcaaactacgccctgatcggcgcactgcgagcagtagcccaaacaatctcatatgaagtcaccctagccatcattctactatcaacattactaataagtggctcctttaacctctccacccttatcacaacacaagaacacctctgattactcctgccatcatgacccttggccataatatgatttatctccacactagcagagaccaaccgaacccccttcgaccttgccgaaggggagtccgaactagtctcaggcttcaacatcgaatacgccgcaggccccttcgccctattcttcatagccgaatacacaaacattattataataaacaccctcaccactacaatcttcctaggaacaacatatgacgcactctcccctgaactctacacaacatattttgtcaccaagaccctacttctaacctccctgttcttatgaattcgaacagcatacccccgattccgctacgaccaactcatacacctcctatgaaaaaacttcctaccactcaccctagcattacttatatgatatgtctccatacccattacaatctccagcattccccctcaaacctaagaaatatgtctgataaaagagttactttgatagagtaaataataggagcttaaacccccttatttctaggactatgagaatcgaacccatccctgagaatccaaaattctccgtgccacctatcacaccccatcctaaagtaaggtcagctaaataagctatcgggcccataccccgaaaatgttggttatacccttcccgtactaattaatcccctggcccaacccgtcatctactctaccatctttgcaggcacactcatcacagcgctaagctcgcactgattttttacctgagtaggcctagaaataaacatgctagcttttattccagttctaaccaaaaaaataaaccctcgttccacagaagctgccatcaagtatttcctcacgcaagcaaccgcatccataatccttctaatagctatcctcttcaacaatatactctccggacaatgaaccataaccaatactaccaatcaatactcatcattaataatcataatagctatagcaataaaactaggaatagccccctttcacttctgagtcccagaggttacccaaggcacccctctgacatccggcctgcttcttctcacatgacaaaaactagcccccatctcaatcatataccaaatctctccctcactaaacgtaagccttctcctcactctctcaatcttatccatcatagcaggcagttgaggtggattaaaccaaacccagctacgcaaaatcttagcatactcctcaattacccacataggatgaataatagcagttctaccgtacaaccctaacataaccattcttaatttaactatttatattatcctaactactaccgcattcctactactcaacttaaactccagcaccacgaccctactactatctcgcacctgaaacaagctaacatgactaacacccttaattccatccaccctcctctccctaggaggcctgcccccgctaaccggctttttgcccaaatgggccattatcgaagaattcacaaaaaacaatagcctcatcatccccaccatcatagccaccatcaccctccttaacctctacttctacctacgcctaatctactccacctcaatcacactactccccatatctaacaacgtaaaaataaaatgacagtttgaacatacaaaacccaccccattcctccccacactcatcgcccttaccacgctactcctacctatctccccttttatactaataatcttatagaaatttaggttaaatacagaccaagagccttcaaagccctcagtaagttgcaatacttaatttctgtaacagctaaggactgcaaaaccccactctgcatcaactgaacgcaaatcagccactttaattaagctaagcccttactagaccaatgggacttaaacccacaaacacttagttaacagctaagcaccctaatcaactggcttcaatctacttctcccgccgccgggaaaaaaggcgggagaagccccggcaggtttgaagctgcttcttcgaatttgcaattcaatatgaaaatcacctcggagctggtaaaaagaggcctaacccctgtctttagatttacagtccaatgcttcactcagccattttacctcacccccactgatgttcgccgaccgttgactattctctacaaaccacaaagacattggaacactatacctattattcggcgcatgagctggagtcctaggcacagctctaagcctccttattcgagccgagctgggccagccaggcaaccttctaggtaacgaccacatctacaacgttatcgtcacagcccatgcatttgtaataatcttcttcatagtaatacccatcataatcggaggctttggcaactgactagttcccctaataatcggtgcccccgatatggcgtttccccgcataaacaacataagcttctgactcttacctccctctctcctactcctgctcgcatctgctatagtggaggccggagcaggaacaggttgaacagtctaccctcccttagcagggaactactcccaccctggagcctccgtagacctaaccatcttctccttacacctagcaggtgtctcctctatcttaggggccatcaatttcatcacaacaattatcaatataaaaccccctgccataacccaataccaaacgcccctcttcgtctgatccgtcctaatcacagcagtcctacttctcctatctctcccagtcctagctgctggcatcactatactactaacagaccgcaacctcaacaccaccttcttcgaccccgccggaggaggagaccccattctataccaacacctattctgatttttcggtcaccctgaagtttatattcttatcctaccaggcttcggaataatctcccatattgtaacttactactccggaaaaaaagaaccatttggatacataggtatggtctgagctatgatatcaattggcttcctagggtttatcgtgtgagcacaccatatatttacagtaggaatagacgtagacacacgagcatatttcacctccgctaccataatcatcgctatccccaccggcgtcaaagtatttagctgactcgccacactccacggaagcaatatgaaatgatctgctgcagtgctctgagccctaggattcatctttcttttcaccgtaggtggcctgactggcattgtattagcaaactcatcactagacatcgtactacacgacacgtactacgttgtagcccacttccactatgtcctatcaataggagctgtatttgccatcataggaggcttcattcactgatttcccctattctcaggctacaccctagaccaaacctacgccaaaatccatttcactatcatattcatcggcgtaaatctaactttcttcccacaacactttctcggcctatccggaatgccccgacgttactcggactaccccgatgcatacaccacatgaaacatcctatcatctgtaggctcattcatttctctaacagcagtaatattaataattttcatgatttgagaagccttcgcttcgaagcgaaaagtcctaatagtagaagaaccctccataaacctggagtgactatatggatgccccccaccctaccacacattcgaagaacccgtatacataaaatctagacaaaaaaggaaggaatcgaaccccccaaagctggtttcaagccaaccccatggcctccatgactttttcaaaaaggtattagaaaaaccatttcataactttgtcaaagttaaattataggctaaatcctatatatcttaatggcacatgcagcgcaagtaggtctacaagacgctacttcccctatcatagaagagcttatcacctttcatgatcacgccctcataatcattttccttatctgcttcctagtcctgtatgcccttttcctaacactcacaacaaaactaactaatactaacatctcagacgctcaggaaatagaaaccgtctgaactatcctgcccgccatcatcctagtcctcatcgccctcccatccctacgcatcctttacataacagacgaggtcaacgatccctcccttaccatcaaatcaattggccaccaatggtactgaacctacgagtacaccgactacggcggactaatcttcaactcctacatacttcccccattattcctagaaccaggcgacctgcgactccttgacgttgacaatcgagtagtactcccgattgaagcccccattcgtataataattacatcacaagacgtcttgcactcatgagctgtccccacattaggcttaaaaacagatgcaattcccggacgtctaaaccaaaccactttcaccgctacacgaccgggggtatactacggtcaatgctctgaaatctgtggagcaaaccacagtttcatgcccatcgtcctagaattaattcccctaaaaatctttgaaatagggcccgtatttaccctatagcaccccctctaccccctctagagcccactgtaaagctaacttagcattaaccttttaagttaaagattaagagaaccaacacctctttacagtgaaatgccccaactaaatactaccgtatggcccaccataattacccccatactccttacactattcctcatcacccaactaaaaatattaaacacaaactaccacctacctccctcaccaaagcccataaaaataaaaaattataacaaaccctgagaaccaaaatgaacgaaaatctgttcgcttcattcattgcccccacaatcctaggcctacccgccgcagtactgatcattctatttccccctctattgatccccacctccaaatatctcatcaacaaccgactaatcaccacccaacaatgactaatcaaactaacctcaaaacaaatgataaccatacacaacactaaaggacgaacctgatctcttatactagtatccttaatcatttttattgccacaactaacctcctcggactcctgcctcactcatttacaccaaccacccaactatctataaacctagccatggccatccccttatgagcgggcacagtgattataggctttcgctctaagattaaaaatgccctagcccacttcttaccacaaggcacacctacaccccttatccccatactagttattatcgaaaccatcagcctactcattcaaccaatagccctggccgtacgcctaaccgctaacattactgcaggccacctactcatgcacctaattggaagcgccaccctagcaatatcaaccattaaccttccctctacacttatcatcttcacaattctaattctactgactatcctagaaatcgctgtcgccttaatccaagcctacgttttcacacttctagtaagcctctacctgcacgacaacacataatgacccaccaatcacatgcctatcatatagtaaaacccagcccatgacccctaacaggggccctctcagccctcctaatgacctccggcctagccatgtgatttcacttccactccataacgctcctcatactaggcctactaaccaacacactaaccatataccaatgatggcgcgatgtaacacgagaaagcacataccaaggccaccacacaccacctgtccaaaaaggccttcgatacgggataatcctatttattacctcagaagtttttttcttcgcaggatttttctgagccttttaccactccagcctagcccctaccccccaattaggagggcactggcccccaacaggcatcaccccgctaaatcccctagaagtcccactcctaaacacatccgtattactcgcatcaggagtatcaatcacctgagctcaccatagtctaatagaaaacaaccgaaaccaaataattcaagcactgcttattacaattttactgggtctctattttaccctcctacaagcctcagagtacttcgagtctcccttcaccatttccgacggcatctacggctcaacattttttgtagccacaggcttccacggacttcacgtcattattggctcaactttcctcactatctgcttcatccgccaactaatatttcactttacatccaaacatcactttggcttcgaagccgccgcctgatactggcattttgtagatgtggtttgactatttctgtatgtctccatctattgatgagggtcttactcttttagtataaatagtaccgttaacttccaattaactagttttgacaacattcaaaaaagagtaataaacttcgccttaattttaataatcaacaccctcctagccttactactaataattattacattttgactaccacaactcaacggctacatagaaaaatccaccccttacgagtgcggcttcgaccctatatcccccgcccgcgtccctttctccataaaattcttcttagtagctattaccttcttattatttgatctagaaattgccctccttttacccctaccatgagccctacaaacaactaacctgccactaatagttatgtcatccctcttattaatcatcatcctagccctaagtctggcctatgagtgactacaaaaaggattagactgaaccgaattggtatatagtttaaacaaaacgaatgatttcgactcattaaattatgataatcatatttaccaaatgcccctcatttacataaatattatactagcatttaccatctcacttctaggaatactagtatatcgctcacacctcatatcctccctactatgcctagaaggaataatactatcgctgttcattatagctactctcataaccctcaacacccactccctcttagccaatattgtgcctattgccatactagtctttgccgcctgcgaagcagcggtgggcctagccctactagtctcaatctccaacacatatggcctagactacgtacataacctaaacctactccaatgctaaaactaatcgtcccaacaattatattactaccactgacatgactttccaaaaaacacataatttgaatcaacacaaccacccacagcctaattattagcatcatccctctactattttttaaccaaatcaacaacaacctatttagctgttccccaaccttttcctccgaccccctaacaacccccctcctaatactaactacctgactcctacccctcacaatcatggcaagccaacgccacttatccagtgaaccactatcacgaaaaaaactctacctctctatactaatctccctacaaatctccttaattataacattcacagccacagaactaatcatattttatatcttcttcgaaaccacacttatccccaccttggctatcatcacccgatgaggcaaccagccagaacgcctgaacgcaggcacatacttcctattctacaccctagtaggctcccttcccctactcatcgcactaatttacactcacaacaccctaggctcactaaacattctactactcactctcactgcccaagaactatcaaactcctgagccaacaacttaatatgactagcttacacaatagcttttatagtaaagatacctctttacggactccacttatgactccctaaagcccatgtcgaagcccccatcgctgggtcaatagtacttgccgcagtactcttaaaactaggcggctatggtataatacgcctcacactcattctcaaccccctgacaaaacacatagcctaccccttccttgtactatccctatgaggcataattataacaagctccatctgcctacgacaaacagacctaaaatcgctcattgcatactcttcaatcagccacatagccctcgtagtaacagccattctcatccaaaccccctgaagcttcaccggcgcagtcattctcataatcgcccacgggcttacatcctcattactattctgcctagcaaactcaaactacgaacgcactcacagtcgcatcataatcctctctcaaggacttcaaactctactcccactaatagctttttgatgacttctagcaagcctcgctaacctcgccttaccccccactattaacctactgggagaactctctgtgctagtaaccacgttctcctgatcaaatatcactctcctacttacaggactcaacatactagtcacagccctatactccctctacatatttaccacaacacaatggggctcactcacccaccacattaacaacataaaaccctcattcacacgagaaaacaccctcatgttcatacacctatcccccattctcctcctatccctcaaccccgacatcattaccgggttttcctcttgtaaatatagtttaaccaaaacatcagattgtgaatctgacaacagaggcttacgaccccttatttaccgagaaagctcacaagaactgctaactcatgcccccatgtctaacaacatggctttctcaacttttaaaggataacagctatccattggtcttaggccccaaaaattttggtgcaactccaaataaaagtaataaccatgcacactactataaccaccctaaccctgacttccctaattccccccatccttaccaccctcgttaaccctaacaaaaaaaactcatacccccattatgtaaaatccattgtcgcatccacctttattatcagtctcttccccacaacaatattcatgtgcctagaccaagaagttattatctcgaactgacactgagccacaacccaaacaacccagctctccctaagcttcaaactagactacttctccataatattcatccctgtagcattgttcgttacatggtccatcatagaattctcactgtgatatataaactcagacccaaacattaatcagttcttcaaatatctactcatcttcctaattaccatactaatcttagttaccgctaacaacctattccaactgttcatcggctgagagggcgtaggaattatatccttcttgctcatcagttgatgatacgcccgagcagatgccaacacagcagccattcaagcaatcctatacaaccgtatcggcgatatcggtttcatcctcgccttagcatgatttatcctacactccaactcatgagacccacaacaaatagcccttctaaacgctaatccaagcctcaccccactactaggcctcctcctagcagcagcaggcaaatcagcccaattaggtctccacccctgactcccctcagccatagaaggccccaccccagtctcagccctactccactcaagcactatagttgtagcaggaatcttcttactcatccgcttccaccccctagcagaaaatagcccactaatccaaactctaacactatgcttaggcgctatcaccactctgttcgcagcagtctgcgcccttacacaaaatgacatcaaaaaaatcgtagccttctccacttcaagtcaactaggactcataatagttacaatcggcatcaaccaaccacacctagcattcctgcacatctgtacccacgccttcttcaaagccatactatttatgtgctccgggtccatcatccacaaccttaacaatgaacaagatattcgaaaaataggaggactactcaaaaccatacctctcacttcaacctccctcaccattggcagcctagcattagcaggaatacctttcctcacaggtttctactccaaagaccacatcatcgaaaccgcaaacatatcatacacaaacgcctgagccctatctattactctcatcgctacctccctgacaagcgcctatagcactcgaataattcttctcaccctaacaggtcaacctcgcttccccacccttactaacattaacgaaaataaccccaccctactaaaccccattaaacgcctggcagccggaagcctattcgcaggatttctcattactaacaacatttcccccgcatcccccttccaaacaacaatccccctctacctaaaactcacagccctcgctgtcactttcctaggacttctaacagccctagacctcaactacctaaccaacaaacttaaaataaaatccccactatgcacattttatttctccaacatactcggattctaccctagcatcacacaccgcacaatcccctatctaggccttcttacgagccaaaacctgcccctactcctcctagacctaacctgactagaaaagctattacctaaaacaatttcacagcaccaaatctccacctccatcatcacctcaacccaaaaaggcataattaaactttacttcctctctttcttcttcccactcatcctaaccctactcctaatcacataacctattcccccgagcaatctcaattacaatatatacaccaacaaacaatgttcaaccagtaactactactaatcaacgcccataatcatacaaagcccccgcaccaataggatcctcccgaatcaaccctgacccctctccttcataaattattcagcttcctacactattaaagtttaccacaaccaccaccccatcatactctttcacccacagcaccaatcctacctccatcgctaaccccactaaaacactcaccaagacctcaacccctgacccccatgcctcaggatactcctcaatagccatcgctgtagtatatccaaagacaaccatcattccccctaaataaattaaaaaaactattaaacccatataacctcccccaaaattcagaataataacacacccgaccacaccgctaacaatcaatactaaacccccataaataggagaaggcttagaagaaaaccccacaaaccccattactaaacccacactcaacagaaacaaagcatacatcattattctcgcacggactacaaccacgaccaatgatatgaaaaaccatcgttgtatttcaactacaagaacaccaatgaccccaatacgcaaaactaaccccctaataaaattaattaaccactcattcatcgacctccccaccccatccaacatctccgcatgatgaaacttcggctcactccttggcgcctgcctgatcctccaaatcaccacaggactattcctagccatgcactactcaccagacgcctcaaccgccttttcatcaatcgcccacatcactcgagacgtaaattatggctgaatcatccgctaccttcacgccaatggcgcctcaatattctttatctgcctcttcctacacatcgggcgaggcctatattacggatcatttctctactcagaaacctgaaacatcggcattatcctcctgcttgcaactatagcaacagccttcataggctatgtcctcccgtgaggccaaatatcattctgaggggccacagtaattacaaacttactatccgccatcccatacattgggacagacctagttcaatgaatctgaggaggctactcagtagacagtcccaccctcacacgattctttacctttcacttcatcttgcccttcattattgcagccctagcaacactccacctcctattcttgcacgaaacgggatcaaacaaccccctaggaatcacctcccattccgataaaatcaccttccacccttactacacaatcaaagacgccctcggcttacttctcttccttctctccttaatgacattaacactattctcaccagacctcctaggcgacccagacaattataccctagccaaccccttaaacacccctccccacatcaagcccgaatgatatttcctattcgcctacacaattctccgatccgtccctaacaaactaggaggcgtccttgccctattactatccatcctcatcctagcaataatccccatcctccatatatccaaacaacaaagcataatatttcgcccactaagccaatcactttattgactcctagccgcagacctcctcattctaacctgaatcggaggacaaccagtaagctacccttttaccatcattggacaagtagcatccgtactatacttcacaacaatcctaatcctaataccaactatctccctaattgaaaacaaaatactcaaatgggcctgtccttgtagtataaactaatacaccagtcttgtaaaccggagatgaaaacctttttccaaggacaaatcagagaaaaagtctttaactccaccattagcacccaaagctaagattctaatttaaactattctctgttctttcatggggaagcagatttgggtaccacccaagtattgactcacccatcaacaaccgctatgtatttcgtacattactgccagccaccatgaatattgtacggtaccataaatacttgaccacctgtagtacataaaaacccaatccacatcaaaaccccctccccatgcttacaagcaagtacagcaatcaaccctcaactatcacacatcaactgcaactccaaagccacccctcacccactaggataccaacaaacctacccacccttaacagtacatagtacataaagccatttaccgtacatagcacattacagtcaaatcccttctcgtccccatggatgacccccctcagataggggtcccttgaccaccatcctccgtgaaatcaatatcccgcacaagagtgctactctcctcgctccgggcccataacacttgggggtagctaaagtgaactgtatccgacatctggttcctacttcagggtcataaagcctaaatagcccacacgttccccttaaataagacatcacgatg

SEQ ID NO: 127 - DNA, 16569 bp, Homo sapiens mitochondrial DNA
  insertion (567)..(568): 567.1INS C
gatcacaggtctatcaccctattaaccactcacgggagctctccatgcatttggtattttcgtctggggggtatgcacgcgatagcattgcgagacgctggagccggagcaccctatgtcgcagtatctgtctttgattcctgcctcatcctattatttatcgcacctacgttcaatattacaggcgaacatacttactaaagtgtgttaattaattaatgcttgtaggacataataataacaattgaatgtctgcacagccactttccacacagacatcataacaaaaaatttccaccaaaccccccctcccccgcttctggccacagcacttaaacacatctctgccaaaccccaaaaacaaagaaccctaacaccagcctaaccagatttcaaattttatcttttggcggtatgcacttttaacagtcaccccccaactaacacattattttcccctcccactcccatactactaatctcatcaatacaacccccgcccatcctacccagcacacacacaccgctgctaaccccataccccgaaccaaccaaaccccaaagacacccccccacagtttatgtagcttacctcctcaaagcaatacactgaaaatgtttagacgggctcacatcaccccataaacaaataggtttggtcctagcctttctattagctcttagtaagattacacatgcaagcatccccgttccagtgagttcaccctctaaatcaccacgatcaaaaggaacaagcatcaagcacgcagcaatgcagctcaaaacgcttagcctagccacacccccacgggaaacagcagtgattaacctttagcaataaacgaaagtttaactaagctatactaaccccagggttggtcaatttcgtgccagccaccgcggtcacacgattaacccaagtcaatagaagccggcgtaaagagtgttttagatcaccccctccccaataaagctaaaactcacctgagttgtaaaaaactccagttgacacaaaatagactacgaaagtggctttaacatatctgaacacacaatagctaagacccaaactgggattagataccccactatgcttagccctaaacctcaacagttaaatcaacaaaactgctcgccagaacactacgagccacagcttaaaactcaaaggacctggcggtgcttcatatccctctagaggagcctgttctgtaatcgataaaccccgatcaacctcaccacctcttgctcagcctatataccgccatcttcagcaaaccctgatgaaggctacaaagtaagcgcaagtacccacgtaaagacgttaggtcaaggtgtagcccatgaggtggcaagaaatgggctacattttctaccccagaaaactacgatagcccttatgaaacttaagggtcgaaggtggatttagcagtaaactaagagtagagtgcttagttgaacagggccctgaagcgcgtacacaccgcccgtcaccctcctcaagtatacttcaaaggacatttaactaaaacccctacgcatttatatagaggagacaagtcgtaacatggtaagtgtactggaaagtgcacttggacgaaccagagtgtagcttaacacaaagcacccaacttacacttaggagatttcaacttaacttgaccgctctgagctaaacctagccccaaacccactccaccttactaccagacaaccttagccaaaccatttacccaaataaagtataggcgatagaaattgaaacctggcgcaatagatatagtaccgcaagggaaagatgaaaaattataaccaagcataatatagcaaggactaacccctataccttctgcataatgaattaactagaaataactttgcaaggagagccaaagctaagacccccgaaaccagacgagctacctaagaacagctaaaagagcacacccgtctatgtagcaaaatagtgggaagatttataggtagaggcgacaaacctaccgagcctggtgatagctggttgtccaagatagaatcttagttcaactttaaatttgcccacagaaccctctaaatccccttgtaaatttaactgttagtccaaagaggaacagctctttggacactaggaaaaaaccttgtagagagagtaaaaaatttaacacccatagtaggcctaaaagcagccaccaattaagaaagcgttcaagctcaacacccactacctaaaaaatcccaaacatataactgaactcctcacacccaattggaccaatctatcaccctatagaagaactaatgttagtataagtaacatgaaaacattctcctccgcataagcctgcgtcagattaaaacactgaactgacaattaacagcccaatatctacaatcaaccaacaagtcattattaccctcactgtcaacccaacacaggcatgctcataaggaaaggttaaaaaaagtaaaaggaactcggcaaatcttaccccgcctgtttaccaaaaacatcacctctagcatcaccagtattagaggcaccgcctgcccagtgacacatgtttaacggccgcggtaccctaaccgtgcaaaggtagcataatcacttgttccttaaatagggacctgtatgaatggctccacgagggttcagctgtctcttacttttaaccagtgaaattgacctgcccgtgaagaggcgggcataacacagcaagacgagaagaccctatggagctttaatttattaatgcaaacagtacctaacaaacccacaggtcctaaactaccaaacctgcattaaaaatttcggttggggcgacctcggagcagaacccaacctccgagcagtacatgctaagacttcaccagtcaaagcgaactactatactcaattgatccaataacttgaccaacggaacaagttaccctagggataacagcgcaatcctattctagagtccatatcaacaatagggtttacgacctcgatgttggatcaggacatcccgatggtgcagccgctattaaaggttcgtttgttcaacgattaaagtcctacgtgatctgagttcagaccggagtaatccaggtcggtttctatctacttcaaattcctccctgtacgaaaggacaagagaaataaggcctacttcacaaagcgccttcccccgtaaatgatatcatctcaacttagtattatacccacacccacccaagaacagggtttgttaagatggcagagcccggtaatcgcataaaacttaaaactttacagtcagaggttcaattcctcttcttaacaacatacccatggccaacctcctactcctcattgtacccattctaatcgcaatggcattcctaatgcttaccgaacgaaaaattctaggctatatacaactacgcaaaggccccaacgttgtaggcccctacgggctactacaacccttcgctgacgccataaaactcttcaccaaagagcccctaaaacccgccacatctaccatcaccctctacatcaccgccccgaccttagctctcaccatcgctcttctactatgaacccccctccccatacccaaccccctggtcaacctcaacctaggcctcctatttattctagccacctctagcctagccgtttactcaatcctctgatcagggtgagcatcaaactcaaactacgccctgatcggcgcactgcgagcagtagcccaaacaatctcatatgaagtcaccctagccatcattctactatcaacattactaataagtggctcctttaacctctccacccttatcacaacacaagaacacctctgattactcctgccatcatgacccttggccataatatgatttatctccacactagcagagaccaaccgaacccccttcgaccttgccgaaggggagtccgaactagtctcaggcttcaacatcgaatacgccgcaggccccttcgccctattcttcatagccgaatacacaaacattattataataaacaccctcaccactacaatcttcctaggaacaacatatgacgcactctcccctgaactctacacaacatattttgtcaccaagaccctacttctaacctccctgttcttatgaattcgaacagcatacccccgattccgctacgaccaactcatacacctcctatgaaaaaacttcctaccactcaccctagcattacttatatgatatgtctccatacccattacaatctccagcattccccctcaaacctaagaaatatgtctgataaaagagttactttgatagagtaaataataggagcttaaacccccttatttctaggactatgagaatcgaacccatccctgagaatccaaaattctccgtgccacctatcacaccccatcctaaagtaaggtcagctaaataagctatcgggcccataccccgaaaatgttggttatacccttcccgtactaattaatcccctggcccaacccgtcatctactctaccatctttgcaggcacactcatcacagcgctaagctcgcactgattttttacctgagtaggcctagaaataaacatgctagcttttattccagttctaaccaaaaaaataaaccctcgttccacagaagctgccatcaagtatttcctcacgcaagcaaccgcatccataatccttctaatagctatcctcttcaacaatatactctccggacaatgaaccataaccaatactaccaatcaatactcatcattaataatcataatagctatagcaataaaactaggaatagccccctttcacttctgagtcccagaggttacccaaggcacccctctgacatccggcctgcttcttctcacatgacaaaaactagcccccatctcaatcatataccaaatctctccctcactaaacgtaagccttctcctcactctctcaatcttatccatcatagcaggcagttgaggtggattaaaccaaacccagctacgcaaaatcttagcatactcctcaattacccacataggatgaataatagcagttctaccgtacaaccctaacataaccattcttaatttaactatttatattatcctaactactaccgcattcctactactcaacttaaactccagcaccacgaccctactactatctcgcacctgaaacaagctaacatgactaacacccttaattccatccaccctcctctccctaggaggcctgcccccgctaaccggctttttgcccaaatgggccattatcgaagaattcacaaaaaacaatagcctcatcatccccaccatcatagccaccatcaccctccttaacctctacttctacctacgcctaatctactccacctcaatcacactactccccatatctaacaacgtaaaaataaaatgacagtttgaacatacaaaacccaccccattcctccccacactcatcgcccttaccacgctactcctacctatctccccttttatactaataatcttatagaaatttaggttaaatacagaccaagagccttcaaagccctcagtaagttgcaatacttaatttctgtaacagctaaggactgcaaaaccccactctgcatcaactgaacgcaaatcagccactttaattaagctaagcccttactagaccaatgggacttaaacccacaaacacttagttaacagctaagcaccctaatcaactggcttcaatctacttctcccgccgccgggaaaaaaggcgggagaagccccggcaggtttgaagctgcttcttcgaatttgcaattcaatatgaaaatcacctcggagctggtaaaaagaggcctaacccctgtctttagatttacagtccaatgcttcactcagccattttacctcacccccactgatgttcgccgaccgttgactattctctacaaaccacaaagacattggaacactatacctattattcggcgcatgagctggagtcctaggcacagctctaagcctccttattcgagccgagctgggccagccaggcaaccttctaggtaacgaccacatctacaacgttatcgtcacagcccatgcatttgtaataatcttcttcatagtaatacccatcataatcggaggctttggcaactgactagttcccctaataatcggtgcccccgatatggcgtttccccgcataaacaacataagcttctgactcttacctccctctctcctactcctgctcgcatctgctatagtggaggccggagcaggaacaggttgaacagtctaccctcccttagcagggaactactcccaccctggagcctccgtagacctaaccatcttctccttacacctagcaggtgtctcctctatcttaggggccatcaatttcatcacaacaattatcaatataaaaccccctgccataacccaataccaaacgcccctcttcgtctgatccgtcctaatcacagcagtcctacttctcctatctctcccagtcctagctgctggcatcactatactactaacagaccgcaacctcaacaccaccttcttcgaccccgccggaggaggagaccccattctataccaacacctattctgatttttcggtcaccctgaagtttatattcttatcctaccaggcttcggaataatctcccatattgtaacttactactccggaaaaaaagaaccatttggatacataggtatggtctgagctatgatatcaattggcttcctagggtttatcgtgtgagcacaccatatatttacagtaggaatagacgtagacacacgagcatatttcacctccgctaccataatcatcgctatccccaccggcgtcaaagtatttagctgactcgccacactccacggaagcaatatgaaatgatctgctgcagtgctctgagccctaggattcatctttcttttcaccgtaggtggcctgactggcattgtattagcaaactcatcactagacatcgtactacacgacacgtactacgttgtagcccacttccactatgtcctatcaataggagctgtatttgccatcataggaggcttcattcactgatttcccctattctcaggctacaccctagaccaaacctacgccaaaatccatttcactatcatattcatcggcgtaaatctaactttcttcccacaacactttctcggcctatccggaatgccccgacgttactcggactaccccgatgcatacaccacatgaaacatcctatcatctgtaggctcattcatttctctaacagcagtaatattaataattttcatgatttgagaagccttcgcttcgaagcgaaaagtcctaatagtagaagaaccctccataaacctggagtgactatatggatgccccccaccctaccacacattcgaagaacccgtatacataaaatctagacaaaaaaggaaggaatcgaaccccccaaagctggtttcaagccaaccccatggcctccatgactttttcaaaaaggtattagaaaaaccatttcataactttgtcaaagttaaattataggctaaatcctatatatcttaatggcacatgcagcgcaagtaggtctacaagacgctacttcccctatcatagaagagcttatcacctttcatgatcacgccctcataatcattttccttatctgcttcctagtcctgtatgcccttttcctaacactcacaacaaaactaactaatactaacatctcagacgctcaggaaatagaaaccgtctgaactatcctgcccgccatcatcctagtcctcatcgccctcccatccctacgcatcctttacataacagacgaggtcaacgatccctcccttaccatcaaatcaattggccaccaatggtactgaacctacgagtacaccgactacggcggactaatcttcaactcctacatacttcccccattattcctagaaccaggcgacctgcgactccttgacgttgacaatcgagtagtactcccgattgaagcccccattcgtataataattacatcacaagacgtcttgcactcatgagctgtccccacattaggcttaaaaacagatgcaattcccggacgtctaaaccaaaccactttcaccgctacacgaccgggggtatactacggtcaatgctctgaaatctgtggagcaaaccacagtttcatgcccatcgtcctagaattaattcccctaaaaatctttgaaatagggcccgtatttaccctatagcaccccctctaccccctctagagcccactgtaaagctaacttagcattaaccttttaagttaaagattaagagaaccaacacctctttacagtgaaatgccccaactaaatactaccgtatggcccaccataattacccccatactccttacactattcctcatcacccaactaaaaatattaaacacaaactaccacctacctccctcaccaaagcccataaaaataaaaaattataacaaaccctgagaaccaaaatgaacgaaaatctgttcgcttcattcattgcccccacaatcctaggcctacccgccgcagtactgatcattctatttccccctctattgatccccacctccaaatatctcatcaacaaccgactaatcaccacccaacaatgactaatcaaactaacctcaaaacaaatgataaccatacacaacactaaaggacgaacctgatctcttatactagtatccttaatcatttttattgccacaactaacctcctcggactcctgcctcactcatttacaccaaccacccaactatctataaacctagccatggccatccccttatgagcgggcacagtgattataggctttcgctctaagattaaaaatgccctagcccacttcttaccacaaggcacacctacaccccttatccccatactagttattatcgaaaccatcagcctactcattcaaccaatagccctggccgtacgcctaaccgctaacattactgcaggccacctactcatgcacctaattggaagcgccaccctagcaatatcaaccattaaccttccctctacacttatcatcttcacaattctaattctactgactatcctagaaatcgctgtcgccttaatccaagcctacgttttcacacttctagtaagcctctacctgcacgacaacacataatgacccaccaatcacatgcctatcatatagtaaaacccagcccatgacccctaacaggggccctctcagccctcctaatgacctccggcctagccatgtgatttcacttccactccataacgctcctcatactaggcctactaaccaacacactaaccatataccaatgatggcgcgatgtaacacgagaaagcacataccaaggccaccacacaccacctgtccaaaaaggccttcgatacgggataatcctatttattacctcagaagtttttttcttcgcaggatttttctgagccttttaccactccagcctagcccctaccccccaattaggagggcactggcccccaacaggcatcaccccgctaaatcccctagaagtcccactcctaaacacatccgtattactcgcatcaggagtatcaatcacctgagctcaccatagtctaatagaaaacaaccgaaaccaaataattcaagcactgcttattacaattttactgggtctctattttaccctcctacaagcctcagagtacttcgagtctcccttcaccatttccgacggcatctacggctcaacattttttgtagccacaggcttccacggacttcacgtcattattggctcaactttcctcactatctgcttcatccgccaactaatatttcactttacatccaaacatcactttggcttcgaagccgccgcctgatactggcattttgtagatgtggtttgactatttctgtatgtctccatctattgatgagggtcttactcttttagtataaatagtaccgttaacttccaattaactagttttgacaacattcaaaaaagagtaataaacttcgccttaattttaataatcaacaccctcctagccttactactaataattattacattttgactaccacaactcaacggctacatagaaaaatccaccccttacgagtgcggcttcgaccctatatcccccgcccgcgtccctttctccataaaattcttcttagtagctattaccttcttattatttgatctagaaattgccctccttttacccctaccatgagccctacaaacaactaacctgccactaatagttatgtcatccctcttattaatcatcatcctagccctaagtctggcctatgagtgactacaaaaaggattagactgaaccgaattggtatatagtttaaacaaaacgaatgatttcgactcattaaattatgataatcatatttaccaaatgcccctcatttacataaatattatactagcatttaccatctcacttctaggaatactagtatatcgctcacacctcatatcctccctactatgcctagaaggaataatactatcgctgttcattatagctactctcataaccctcaacacccactccctcttagccaatattgtgcctattgccatactagtctttgccgcctgcgaagcagcggtgggcctagccctactagtctcaatctccaacacatatggcctagactacgtacataacctaaacctactccaatgctaaaactaatcgtcccaacaattatattactaccactgacatgactttccaaaaaacacataatttgaatcaacacaaccacccacagcctaattattagcatcatccctctactattttttaaccaaatcaacaacaacctatttagctgttccccaaccttttcctccgaccccctaacaacccccctcctaatactaactacctgactcctacccctcacaatcatggcaagccaacgccacttatccagtgaaccactatcacgaaaaaaactctacctctctatactaatctccctacaaatctccttaattataacattcacagccacagaactaatcatattttatatcttcttcgaaaccacacttatccccaccttggctatcatcacccgatgaggcaaccagccagaacgcctgaacgcaggcacatacttcctattctacaccctagtaggctcccttcccctactcatcgcactaatttacactcacaacaccctaggctcactaaacattctactactcactctcactgcccaagaactatcaaactcctgagccaacaacttaatatgactagcttacacaatagcttttatagtaaagatacctctttacggactccacttatgactccctaaagcccatgtcgaagcccccatcgctgggtcaatagtacttgccgcagtactcttaaaactaggcggctatggtataatacgcctcacactcattctcaaccccctgacaaaacacatagcctaccccttccttgtactatccctatgaggcataattataacaagctccatctgcctacgacaaacagacctaaaatcgctcattgcatactcttcaatcagccacatagccctcgtagtaacagccattctcatccaaaccccctgaagcttcaccggcgcagtcattctcataatcgcccacgggcttacatcctcattactattctgcctagcaaactcaaactacgaacgcactcacagtcgcatcataatcctctctcaaggacttcaaactctactcccactaatagctttttgatgacttctagcaagcctcgctaacctcgccttaccccccactattaacctactgggagaactctctgtgctagtaaccacgttctcctgatcaaatatcactctcctacttacaggactcaacatactagtcacagccctatactccctctacatatttaccacaacacaatggggctcactcacccaccacattaacaacataaaaccctcattcacacgagaaaacaccctcatgttcatacacctatcccccattctcctcctatccctcaaccccgacatcattaccgggttttcctcttgtaaatatagtttaaccaaaacatcagattgtgaatctgacaacagaggcttacgaccccttatttaccgagaaagctcacaagaactgctaactcatgcccccatgtctaacaacatggctttctcaacttttaaaggataacagctatccattggtcttaggccccaaaaattttggtgcaactccaaataaaagtaataaccatgcacactactataaccaccctaaccctgacttccctaattccccccatccttaccaccctcgttaaccctaacaaaaaaaactcatacccccattatgtaaaatccattgtcgcatccacctttattatcagtctcttccccacaacaatattcatgtgcctagaccaagaagttattatctcgaactgacactgagccacaacccaaacaacccagctctccctaagcttcaaactagactacttctccataatattcatccctgtagcattgttcgttacatggtccatcatagaattctcactgtgatatataaactcagacccaaacattaatcagttcttcaaatatctactcatcttcctaattaccatactaatcttagttaccgctaacaacctattccaactgttcatcggctgagagggcgtaggaattatatccttcttgctcatcagttgatgatacgcccgagcagatgccaacacagcagccattcaagcaatcctatacaaccgtatcggcgatatcggtttcatcctcgccttagcatgatttatcctacactccaactcatgagacccacaacaaatagcccttctaaacgctaatccaagcctcaccccactactaggcctcctcctagcagcagcaggcaaatcagcccaattaggtctccacccctgactcccctcagccatagaaggccccaccccagtctcagccctactccactcaagcactatagttgtagcaggaatcttcttactcatccgcttccaccccctagcagaaaatagcccactaatccaaactctaacactatgcttaggcgctatcaccactctgttcgcagcagtctgcgcccttacacaaaatgacatcaaaaaaatcgtagccttctccacttcaagtcaactaggactcataatagttacaatcggcatcaaccaaccacacctagcattcctgcacatctgtacccacgccttcttcaaagccatactatttatgtgctccgggtccatcatccacaaccttaacaatgaacaagatattcgaaaaataggaggactactcaaaaccatacctctcacttcaacctccctcaccattggcagcctagcattagcaggaatacctttcctcacaggtttctactccaaagaccacatcatcgaaaccgcaaacatatcatacacaaacgcctgagccctatctattactctcatcgctacctccctgacaagcgcctatagcactcgaataattcttctcaccctaacaggtcaacctcgcttccccacccttactaacattaacgaaaataaccccaccctactaaaccccattaaacgcctggcagccggaagcctattcgcaggatttctcattactaacaacatttcccccgcatcccccttccaaacaacaatccccctctacctaaaactcacagccctcgctgtcactttcctaggacttctaacagccctagacctcaactacctaaccaacaaacttaaaataaaatccccactatgcacattttatttctccaacatactcggattctaccctagcatcacacaccgcacaatcccctatctaggccttcttacgagccaaaacctgcccctactcctcctagacctaacctgactagaaaagctattacctaaaacaatttcacagcaccaaatctccacctccatcatcacctcaacccaaaaaggcataattaaactttacttcctctctttcttcttcccactcatcctaaccctactcctaatcacataacctattcccccgagcaatctcaattacaatatatacaccaacaaacaatgttcaaccagtaactactactaatcaacgcccataatcatacaaagcccccgcaccaataggatcctcccgaatcaaccctgacccctctccttcataaattattcagcttcctacactattaaagtttaccacaaccaccaccccatcatactctttcacccacagcaccaatcctacctccatcgctaaccccactaaaacactcaccaagacctcaacccctgacccccatgcctcaggatactcctcaatagccatcgctgtagtatatccaaagacaaccatcattccccctaaataaattaaaaaaactattaaacccatataacctcccccaaaattcagaataataacacacccgaccacaccgctaacaatcaatactaaacccccataaataggagaaggcttagaagaaaaccccacaaaccccattactaaacccacactcaacagaaacaaagcatacatcattattctcgcacggactacaaccacgaccaatgatatgaaaaaccatcgttgtatttcaactacaagaacaccaatgaccccaatacgcaaaactaaccccctaataaaattaattaaccactcattcatcgacctccccaccccatccaacatctccgcatgatgaaacttcggctcactccttggcgcctgcctgatcctccaaatcaccacaggactattcctagccatgcactactcaccagacgcctcaaccgccttttcatcaatcgcccacatcactcgagacgtaaattatggctgaatcatccgctaccttcacgccaatggcgcctcaatattctttatctgcctcttcctacacatcgggcgaggcctatattacggatcatttctctactcagaaacctgaaacatcggcattatcctcctgcttgcaactatagcaacagccttcataggctatgtcctcccgtgaggccaaatatcattctgaggggccacagtaattacaaacttactatccgccatcccatacattgggacagacctagttcaatgaatctgaggaggctactcagtagacagtcccaccctcacacgattctttacctttcacttcatcttgcccttcattattgcagccctagcaacactccacctcctattcttgcacgaaacgggatcaaacaaccccctaggaatcacctcccattccgataaaatcaccttccacccttactacacaatcaaagacgccctcggcttacttctcttccttctctccttaatgacattaacactattctcaccagacctcctaggcgacccagacaattataccctagccaaccccttaaacacccctccccacatcaagcccgaatgatatttcctattcgcctacacaattctccgatccgtccctaacaaactaggaggcgtccttgccctattactatccatcctcatcctagcaataatccccatcctccatatatccaaacaacaaagcataatatttcgcccactaagccaatcactttattgactcctagccgcagacctcctcattctaacctgaatcggaggacaaccagtaagctacccttttaccatcattggacaagtagcatccgtactatacttcacaacaatcctaatcctaataccaactatctccctaattgaaaacaaaatactcaaatgggcctgtccttgtagtataaactaatacaccagtcttgtaaaccggagatgaaaacctttttccaaggacaaatcagagaaaaagtctttaactccaccattagcacccaaagctaagattctaatttaaactattctctgttctttcatggggaagcagatttgggtaccacccaagtattgactcacccatcaacaaccgctatgtatttcgtacattactgccagccaccatgaatattgtacggtaccataaatacttgaccacctgtagtacataaaaacccaatccacatcaaaaccccctccccatgcttacaagcaagtacagcaatcaaccctcaactatcacacatcaactgcaactccaaagccacccctcacccactaggataccaacaaacctacccacccttaacagtacatagtacataaagccatttaccgtacatagcacattacagtcaaatcccttctcgtccccatggatgacccccctcagataggggtcccttgaccaccatcctccgtgaaatcaatatcccgcacaagagtgctactctcctcgctccgggcccataacacttgggggtagctaaagtgaactgtatccgacatctggttcctacttcagggtcataaagcctaaatagcccacacgttccccttaaataagacatcacgatg

SEQ ID NO: 128 - DNA, 16569 bp, Homo sapiens mitochondrial DNA; identical to SEQ ID NO: 127
  insertion (568)..(569): 568.1INS C

SEQ ID NO: 129 - DNA, 16570 bp, Homo sapiens mitochondrial DNA
  insertion (568)..(569): 568.2INS CC
gatcacaggtctatcaccctattaaccactcacgggagctctccatgcatttggtattttcgtctggggggtatgcacgcgatagcattgcgagacgctggagccggagcaccctatgtcgcagtatctgtctttgattcctgcctcatcctattatttatcgcacctacgttcaatattacaggcgaacatacttactaaagtgtgttaattaattaatgcttgtaggacataataataacaattgaatgtctgcacagccactttccacacagacatcataacaaaaaatttccaccaaaccccccctcccccgcttctggccacagcacttaaacacatctctgccaaaccccaaaaacaaagaaccctaacaccagcctaaccagatttcaaattttatcttttggcggtatgcacttttaacagtcaccccccaactaacacattattttcccctcccactcccatactactaatctcatcaatacaacccccgcccatcctacccagcacacacacaccgctgctaaccccataccccgaaccaaccaaaccccaaagacaccccccccacagtttatgtagcttacctcctcaaagcaatacactgaaaatgtttagacgggctcacatcaccccataaacaaataggtttggtcctagcctttctattagctcttagtaagattacacatgcaagcatccccgttccagtgagttcaccctctaaatcaccacgatcaaaaggaacaagcatcaagcacgcagcaatgcagctcaaaacgcttagcctagccacacccccacgggaaacagcagtgattaacctttagcaataaacgaaagtttaactaagctatactaaccccagggttggtcaatttcgtgccagccaccgcggtcacacgattaacccaagtcaatagaagccggcgtaaagagtgttttagatcaccccctccccaataaagctaaaactcacctgagttgtaaaaaactccagttgacacaaaatagactacgaaagtggctttaacatatctgaacacacaatagctaagacccaaactgggattagataccccactatgcttagccctaaacctcaacagttaaatcaacaaaactgctcgccagaacactacgagccacagcttaaaactcaaaggacctggcggtgcttcatatccctctagaggagcctgttctgtaatcgataaaccccgatcaacctcaccacctcttgctcagcctatataccgccatcttcagcaaaccctgatgaaggctacaaagtaagcgcaagtacccacgtaaagacgttaggtcaaggtgtagcccatgaggtggcaagaaatgggctacattttctaccccagaaaactacgatagcccttatgaaacttaagggtcgaaggtggatttagcagtaaactaagagtagagtgcttagttgaacagggccctgaagcgcgtacacaccgcccgtcaccctcctcaagtatacttcaaaggacatttaactaaaacccctacgcatttatatagaggagacaagtcgtaacatggtaagtgtactggaaagtgcacttggacgaaccagagtgtagcttaacacaaagcacccaacttacacttaggagatttcaacttaacttgaccgctctgagctaaacctagccccaaacccactccaccttactaccagacaaccttagccaaaccatttacccaaataaagtataggcgatagaaattgaaacctggcgcaatagatatagtaccgcaagggaaagatgaaaaattataaccaagcataatatagcaaggactaacccctataccttctgcataatgaattaactagaaataactttgcaaggagagccaaagctaagacccccgaaaccagacgagctacctaagaacagctaaaagagcacacccgtctatgtagcaaaatagtgggaagatttataggtagaggcgacaaacctaccgagcctggtgatagctggttgtccaagatagaatcttagttcaactttaaatttgcccacagaaccctctaaatccccttgtaaatttaactgttagtccaaagaggaacagctctttggacactaggaaaaaaccttgtagagagagtaaaaaatttaacacccatagtaggcctaaaagcagccaccaattaagaaagcgttcaagctcaacacccactacctaaaaaatcccaaacatataactgaactcctcacacccaattggaccaatctatcaccctatagaagaactaatgttagtataagtaacatgaaaacattctcctccgcataagcctgcgtcagattaaaacactgaactgacaattaacagcccaatatctacaatcaaccaacaagtcattattaccctcactgtcaacccaacacaggcatgctcataaggaaaggttaaaaaaagtaaaaggaactcggcaaatcttaccccgcctgtttaccaaaaacatcacctctagcatcaccagtattagaggcaccgcctgcccagtgacacatgtttaacggccgcggtaccctaaccgtgcaaaggtagcataatcacttgttccttaaatagggacctgtatgaatggctccacgagggttcagctgtctcttacttttaaccagtgaaattgacctgcccgtgaagaggcgggcataacacagcaagacgagaagaccctatggagctttaatttattaatgcaaacagtacctaacaaacccacaggtcctaaactaccaaacctgcattaaaaatttcggttggggcgacctcggagcagaacccaacctccgagcagtacatgctaagacttcaccagtcaaagcgaactactatactcaattgatccaataacttgaccaacggaacaagttaccctagggataacagcgcaatcctattctagagtccatatcaacaatagggtttacgacctcgatgttggatcaggacatcccgatggtgcagccgctattaaaggttcgtttgttcaacgattaaagtcctacgtgatctgagttcagaccggagtaatccaggtcggtttctatctacttcaaattcctccctgtacgaaaggacaagagaaataaggcctacttcacaaagcgccttcccccgtaaatgatatcatctcaacttagtattatacccacacccacccaagaacagggtttgttaagatggcagagcccggtaatcgcataaaacttaaaactttacagtcagaggttcaattcctcttcttaacaacatacccatggccaacctcctactcctcattgtacccattctaatcgcaatggcattcctaatgcttaccgaacgaaaaattctaggctatatacaactacgcaaaggccccaacgttgtaggcccctacgggctactacaacccttcgctgacgccataaaactcttcaccaaagagcccctaaaacccgccacatctaccatcaccctctacatcaccgccccgaccttagctctcaccatcgctcttctactatgaacccccctccccatacccaaccccctggtcaacctcaacctaggcctcctatttattctagccacctctagcctagccgtttactcaatcctctgatcagggtgagcatcaaactcaaactacgccctgatcggcgcactgcgagcagtagcccaaacaatctcatatgaagtcaccctagccatcattctactatcaacattactaataagtggctcctttaacctctccacccttatcacaacacaagaacacctctgattactcctgccatcatgacccttggccataatatgatttatctccacactagcagagaccaaccgaacccccttcgaccttgccgaaggggagtccgaactagtctcaggcttcaacatcgaatacgccgcaggccccttcgccctattcttcatagccgaatacacaaacattattataataaacaccctcaccactacaatcttcctaggaacaacatatgacgcactctcccctgaactctacacaacatattttgtcaccaagaccctacttctaacctccctgttcttatgaattcgaacagcatacccccgattccgctacgaccaactcatacacctcctatgaaaaaacttcctaccactcaccctagcattacttatatgatatgtctccatacccattacaatctccagcattccccctcaaacctaagaaatatgtctgataaaagagttactttgatagagtaaataataggagcttaaacccccttatttctaggactatgagaatcgaacccatccctgagaatccaaaattctccgtgccacctatcacaccccatcctaaagtaaggtcagctaaataagctatcgggcccataccccgaaaatgttggttatacccttcccgtactaattaatcccctggcccaacccgtcatctactctaccatctttgcaggcacactcatcacagcgctaagctcgcactgattttttacctgagtaggcctagaaataaacatgctagcttttattccagttctaaccaaaaaaataaaccctcgttccacagaagctgccatcaagtatttcctcacgcaagcaaccgcatccataatccttctaatagctatcctcttcaacaatatactctccggacaatgaaccataaccaatactaccaatcaatactcatcattaataatcataatagctatagcaataaaactaggaatagccccctttcacttctgagtcccagaggttacccaaggcacccctctgacatccggcctgcttcttctcacatgacaaaaactagcccccatctcaatcatataccaaatctctccctcactaaacgtaagccttctcctcactctctcaatcttatccatcatagcaggcagttgaggtggattaaaccaaacccagctacgcaaaatcttagcatactcctcaattacccacataggatgaataatagcagttctaccgtacaaccctaacataaccattcttaatttaactatttatattatcctaactactaccgcattcctactactcaacttaaactccagcaccacgaccctactactatctcgcacctgaaacaagctaacatgactaacacccttaattccatccaccctcctctccctaggaggcctgcccccgctaaccggctttttgcccaaatgggccattatcgaagaattcacaaaaaacaatagcctcatcatccccaccatcatagccaccatcaccctccttaacctctacttctacctacgcctaatctactccacctcaatcacactactccccatatctaacaacgtaaaaataaaatgacagtttgaacatacaaaacccaccccattcctccccacactcatcgcccttaccacgctactcctacctatctccccttttatactaataatcttatagaaatttaggttaaatacagaccaagagccttcaaagccctcagtaagttgcaatacttaatttctgtaacagctaaggactgcaaaaccccactctgcatcaactgaacgcaaatcagccactttaattaagctaagcccttactagaccaatgggacttaaacccacaaacacttagttaacagctaagcaccctaatcaactggcttcaatctacttctcccgccgccgggaaaaaaggcgggagaagccccggcaggtttgaagctgcttcttcgaatttgcaattcaatatgaaaatcacctcggagctggtaaaaagaggcctaacccctgtctttagatttacagtccaatgcttcactcagccattttacctcacccccactgatgttcgccgaccgttgactattctctacaaaccacaaagacattggaacactatacctattattcggcgcatgagctggagtcctaggcacagctctaagcctccttattcgagccgagctgggccagccaggcaaccttctaggtaacgaccacatctacaacgttatcgtcacagcccatgcatttgtaataatcttcttcatagtaatacccatcataatcggaggctttggcaactgactagttcccctaataatcggtgcccccgatatggcgtttccccgcataaacaacataagcttctgactcttacctccctctctcctactcctgctcgcatctgctatagtggaggccggagcaggaacaggttgaacagtctaccctcccttagcagggaactactcccaccctggagcctccgtagacctaaccatcttctccttacacctagcaggtgtctcctctatcttaggggccatcaatttcatcacaacaattatcaatataaaaccccctgccataacccaataccaaacgcccctcttcgtctgatccgtcctaatcacagcagtcctacttctcctatctctcccagtcctagctgctggcatcactatactactaacagaccgcaacctcaacaccaccttcttcgaccccgccggaggaggagaccccattctataccaacacctattctgatttttcggtcaccctgaagtttatattcttatcctaccaggcttcggaataatctcccatattgtaacttactactccggaaaaaaagaaccatttggatacataggtatggtctgagctatgatatcaattggcttcctagggtttatcgtgtgagcacaccatatatttacagtaggaatagacgtagacacacgagcatatttcacctccgctaccataatcatcgctatccccaccggcgtcaaagtatttagctgactcgccacactccacggaagcaatatgaaatgatctgctgcagtgctctgagccctaggattcatctttcttttcaccgtaggtggcctgactggcattgtattagcaaactcatcactagacatcgtactacacgacacgtactacgttgtagcccacttccactatgtcctatcaataggagctgtatttgccatcataggaggcttcattcactgatttcccctattctcaggctacaccctagaccaaacctacgccaaaatccatttcactatcatattcatcggcgtaaatctaactttcttcccacaacactttctcggcctatccggaatgccccgacgttactcggactaccccgatgcatacaccacatgaaacatcctatcatctgtaggctcattcatttctctaacagcagtaatattaataattttcatgatttgagaagccttcgcttcgaagcgaaaagtcctaatagtagaagaaccctccataaacctggagtgactatatggatgccccccaccctaccacacattcgaagaacccgtatacataaaatctagacaaaaaaggaaggaatcgaaccccccaaagctggtttcaagccaaccccatggcctccatgactttttcaaaaaggtattagaaaaaccatttcataactttgtcaaagttaaattataggctaaatcctatatatcttaatggcacatgcagcgcaagtaggtctacaagacgctacttcccctatcatagaagagcttatcacctttcatgatcacgccctcataatcattttccttatctgcttcctagtcctgtatgcccttttcctaacactcacaacaaaactaactaatactaacatctcagacgctcaggaaatagaaaccgtctgaactatcctgcccgccatcatcctagtcctcatcgccctcccatccctacgcatcctttacataacagacgaggtcaacgatccctcccttaccatcaaatcaattggccaccaatggtactgaacctacgagtacaccgactacggcggactaatcttcaactcctacatacttcccccattattcctagaaccaggcgacctgcgactccttgacgttgacaatcgagtagtactcccgattgaagcccccattcgtataataattacatcacaagacgtcttgcactcatgagctgtccccacattaggcttaaaaacagatgcaattcccggacgtctaaaccaaaccactttcaccgctacacgaccgggggtatactacggtcaatgctctgaaatctgtggagcaaaccacagtttcatgcccatcgtcctagaattaattcccctaaaaatctttgaaatagggcccgtatttaccctatagcaccccctctaccccctctagagcccactgtaaagctaacttagcattaaccttttaagttaaagattaagagaaccaacacctctttacagtgaaatgccccaactaaatactaccgtatggcccaccataattacccccatactccttacactattcctcatcacccaactaaaaatattaaacacaaactaccacctacctccctcaccaaagcccataaaaataaaaaattataacaaaccctgagaaccaaaatgaacgaaaatctgttcgcttcattcattgcccccacaatcctaggcctacccgccgcagtactgatcattctatttccccctctattgatccccacctccaaatatctcatcaacaaccgactaatcaccacccaacaatgactaatcaaactaacctcaaaacaaatgataaccatacacaacactaaaggacgaacctgatctcttatactagtatccttaatcatttttattgccacaactaacctcctcggactcctgcctcactcatttacaccaaccacccaactatctataaacctagccatggccatccccttatgagcgggcacagtgattataggctttcgctctaagattaaaaatgccctagcccacttcttaccacaaggcacacctacaccccttatccccatactagttattatcgaaaccatcagcctactcattcaaccaatagccctggccgtacgcctaaccgctaacattactgcaggccacctactcatgcacctaattggaagcgccaccctagcaatatcaaccattaaccttccctctacacttatcatcttcacaattctaattctactgactatcctagaaatcgctgtcgccttaatccaagcctacgttttcacacttctagtaagcctctacctgcacgacaacacataatgacccaccaatcacatgcctatcatatagtaaaacccagcccatgacccctaacaggggccctctcagccctcctaatgacctccggcctagccatgtgatttcacttccactccataacgctcctcatactaggcctactaaccaacacactaaccatataccaatgatggcgcgatgtaacacgagaaagcacataccaaggccaccacacaccacctgtccaaaaaggccttcgatacgggataatcctatttattacctcagaagtttttttcttcgcaggatttttctgagccttttaccactccagcctagcccctaccccccaattaggagggcactggcccccaacaggcatcaccccgctaaatcccctagaagtcccactcctaaacacatccgtattactcgcatcaggagtatcaatcacctgagctcaccatagtctaatagaaaacaaccgaaaccaaataattcaagcactgcttattacaattttactgggtctctattttaccctcctacaagcctcagagtacttcgagtctcccttcaccatttccgacggcatctacggctcaacattttttgtagccacaggcttccacggacttcacgtcattattggctcaactttcctcactatctgcttcatccgccaactaatatttcactttacatccaaacatcactttggcttcgaagccgccgcctgatactggcattttgtagatgtggtttgactatttctgtatgtctccatctattgatgagggtcttactcttttagtataaatagtaccgttaacttccaattaactagttttgacaacattcaaaaaagagtaataaacttcgccttaattttaataatcaacaccctcctagccttactactaataattattacattttgactaccacaactcaacggctacatagaaaaatccaccccttacgagtgcggcttcgaccctatatcccccgcccgcgtccctttctccataaaattcttcttagtagctattaccttcttattatttgatctagaaattgccctccttttacccctaccatgagccctacaaacaactaacctgccactaatagttatgtcatccctcttattaatcatcatcctagccctaagtctggcctatgagtgactacaaaaaggattagactgaaccgaattggtatatagtttaaacaaaacgaatgatttcgactcattaaattatgataatcatatttaccaaatgcccctcatttacataaatattatactagcatttaccatctcacttctaggaatactagtatatcgctcacacctcatatcctccctactatgcctagaaggaataatactatcgctgttcattatagctactctcataaccctcaacacccactccctcttagccaatattgtgcctattgccatactagtctttgccgcctgcgaagcagcggtgggcctagccctactagtctcaatctccaacacatatggcctagactacgtacataacctaaacctactccaatgctaaaactaatcgtcccaacaattatattactaccactgacatgactttccaaaaaacacataatttgaatcaacacaaccacccacagcctaattattagcatcatccctctactattttttaaccaaatcaacaacaacctatttagctgttccccaaccttttcctccgaccccctaacaacccccctcctaatactaactacctgactcctacccctcacaatcatggcaagccaacgccacttatccagtgaaccactatcacgaaaaaaactctacctctctatactaatctccctacaaatctccttaattataacattcacagccacagaactaatcatattttatatcttcttcgaaaccacacttatccccaccttggctatcatcacccgatgaggcaaccagccagaacgcctgaacgcaggcacatacttcctattctacaccctagtaggctcccttcccctactcatcgcactaatttacactcacaacaccctaggctcactaaacattctactactcactctcactgcccaagaactatcaaactcctgagccaacaacttaatatgactagcttacacaatagcttttatagtaaagatacctctttacggactccacttatgactccctaaagcccatgtcgaagcccccatcgctgggtcaatagtacttgccgcagtactcttaaaactaggcggctatggtataatacgcctcacactcattctcaaccccctgacaaaacacatagcctaccccttccttgtactatccctatgaggcataattataacaagctccatctgcctacgacaaacagacctaaaatcgctcattgcatactcttcaatcagccacatagccctcgtagtaacagccattctcatccaaaccccctgaagcttcaccggcgcagtcattctcataatcgcccacgggcttacatcctcattactattctgcctagcaaactcaaactacgaacgcactcacagtcgcatcataatcctctctcaaggacttcaaactctactcccactaatagctttttgatgacttctagcaagcctcgctaacctcgccttaccccccactattaacctactgggagaactctctgtgctagtaaccacgttctcctgatcaaatatcactctcctacttacaggactcaacatactagtcacagccctatactccctctacatatttaccacaacacaatggggctcactcacccaccacattaacaacataaaaccctcattcacacgagaaaacaccctcatgttcatacacctatcccccattctcctcctatccctcaaccccgacatcattaccgggttttcctcttgtaaatatagtttaaccaaaacatcagattgtgaatctgacaacagaggcttacgaccccttatttaccgagaaagctcacaagaactgctaactcatgcccccatgtctaacaacatggctttctcaacttttaaaggataacagctatccattggtcttaggccccaaaaattttggtgcaactccaaataaaagtaataaccatgcacactactataaccaccctaaccctgacttccctaattccccccatccttaccaccctcgttaaccctaacaaaaaaaactcatacccccattatgtaaaatccattgtcgcatccacctttattatcagtctcttccccacaacaatattcatgtgcctagaccaagaagttattatctcgaactgacactgagccacaacccaaacaacccagctctccctaagcttcaaactagactacttctccataatattcatccctgtagcattgttcgttacatggtccatcatagaattctcactgtgatatataaactcagacccaaacattaatcagttcttcaaatatctactcatcttcctaattaccatactaatcttagttaccgctaacaacctattccaactgttcatcggctgagagggcgtaggaattatatccttcttgctcatcagttgatgatacgcccgagcagatgccaacacagcagccattcaagcaatcctatacaaccgtatcggcgatatcggtttcatcctcgccttagcatgatttatcctacactccaactcatgagacccacaacaaatagcccttctaaacgctaatccaagcctcaccccactactaggcctcctcctagcagcagcaggcaaatcagcccaattaggtctccacccctgactcccctcagccatagaaggccccaccccagtctcagccctactccactcaagcactatagttgtagcaggaatcttcttactcatccgcttccaccccctagcagaaaatagcccactaatccaaactctaacactatgcttaggcgctatcaccactctgttcgcagcagtctgcgcccttacacaaaatgacatcaaaaaaatcgtagccttctccacttcaagtcaactaggactcataatagttacaatcggcatcaaccaaccacacctagcattcctgcacatctgtacccacgccttcttcaaagccatactatttatgtgctccgggtccatcatccacaaccttaacaatgaacaagatattcgaaaaataggaggactactcaaaaccatacctctcacttcaacctccctcaccattggcagcctagcattagcaggaatacctttcctcacaggtttctactccaaagaccacatcatcgaaaccgcaaacatatcatacacaaacgcctgagccctatctattactctcatcgctacctccctgacaagcgcctatagcactcgaataattcttctcaccctaacaggtcaacctcgcttccccacccttactaacattaacgaaaataaccccaccctactaaaccccattaaacgcctggcagccggaagcctattcgcaggatttctcattactaacaacatttcccccgcatcccccttccaaacaacaatccccctctacctaaaactcacagccctcgctgtcactttcctaggacttctaacagccctagacctcaactacctaaccaacaaacttaaaataaaatccccactatgcacattttatttctccaacatactcggattctaccctagcatcacacaccgcacaatcccctatctaggccttcttacgagccaaaacctgcccctactcctcctagacctaacctgactagaaaagctattacctaaaacaatttcacagcaccaaatctccacctccatcatcacctcaacccaaaaaggcataattaaactttacttcctctctttcttcttcccactcatcctaaccctactcctaatcacataacctattcccccgagcaatctcaattacaatatatacaccaacaaacaatgttcaaccagtaactactactaatcaacgcccataatcatacaaagcccccgcaccaataggatcctcccgaatcaaccctgacccctctccttcataaattattcagcttcctacactattaaagtttaccacaaccaccaccccatcatactctttcacccacagcaccaatcctacctccatcgctaaccccactaaaacactcaccaagacctcaacccctgacccccatgcctcaggatactcctcaatagccatcgctgtagtatatccaaagacaaccatcattccccctaaataaattaaaaaaactattaaacccatataacctcccccaaaattcagaataataacacacccgaccacaccgctaacaatcaatactaaacccccataaataggagaaggcttagaagaaaaccccacaaaccccattactaaacccacactcaacagaaacaaagcatacatcattattctcgcacggactacaaccacgaccaatgatatgaaaaaccatcgttgtatttcaactacaagaacaccaatgaccccaatacgcaaaactaaccccctaataaaattaattaaccactcattcatcgacctccccaccccatccaacatctccgcatgatgaaacttcggctcactccttggcgcctgcctgatcctccaaatcaccacaggactattcctagccatgcactactcaccagacgcctcaaccgccttttcatcaatcgcccacatcactcgagacgtaaattatggctgaatcatccgctaccttcacgccaatggcgcctcaatattctttatctgcctcttcctacacatcgggcgaggcctatattacggatcatttctctactcagaaacctgaaacatcggcattatcctcctgcttgcaactatagcaacagccttcataggctatgtcctcccgtgaggccaaatatcattctgaggggccacagtaattacaaacttactatccgccatcccatacattgggacagacctagttcaatgaatctgaggaggctactcagtagacagtcccaccctcacacgattctttacctttcacttcatcttgcccttcattattgcagccctagcaacactccacctcctattcttgcacgaaacgggatcaaacaaccccctaggaatcacctcccattccgataaaatcaccttccacccttactacacaatcaaagacgccctcggcttacttctcttccttctctccttaatgacattaacactattctcaccagacctcctaggcgacccagacaattataccctagccaaccccttaaacacccctccccacatcaagcccgaatgatatttcctattcgcctacacaattctccgatccgtccctaacaaactaggaggcgtccttgccctattactatccatcctcatcctagcaataatccccatcctccatatatccaaacaacaaagcataatatttcgcccactaagccaatcactttattgactcctagccgcagacctcctcattctaacctgaatcggaggacaaccagtaagctacccttttaccatcattggacaagtagcatccgtactatacttcacaacaatcctaatcctaataccaactatctccctaattgaaaacaaaatactcaaatgggcctgtccttgtagtataaactaatacaccagtcttgtaaaccggagatgaaaacctttttccaaggacaaatcagagaaaaagtctttaactccaccattagcacccaaagctaagattctaatttaaactattctctgttctttcatggggaagcagatttgggtaccacccaagtattgactcacccatcaacaaccgctatgtatttcgtacattactgccagccaccatgaatattgtacggtaccataaatacttgaccacctgtagtacataaaaacccaatccacatcaaaaccccctccccatgcttacaagcaagtacagcaatcaaccctcaactatcacacatcaactgcaactccaaagccacccctcacccactaggataccaacaaacctacccacccttaacagtacatagtacataaagccatttaccgtacatagcacattacagtcaaatcccttctcgtccccatggatgacccccctcagataggggtcccttgaccaccatcctccgtgaaatcaatatcccgcacaagagtgctactctcctcgctccgggcccataacacttgggggtagctaaagtgaactgtatccgacatctggttcctacttcagggtcataaagcctaaatagcccacacgttccccttaaataagacatcacgatg

SEQ ID NO: 130 - DNA, 16569 bp, Homo sapiens mitochondrial DNA
  insertion (2068)..(2069): 2068.1INS A
gatcacaggtctatcaccctattaaccactcacgggagctctccatgcatttggtattttcgtctggggggtatgcacgcgatagcattgcgagacgctggagccggagcaccctatgtcgcagtatctgtctttgattcctgcctcatcctattatttatcgcacctacgttcaatattacaggcgaacatacttactaaagtgtgttaattaattaatgcttgtaggacataataataacaattgaatgtctgcacagccactttccacacagacatcataacaaaaaatttccaccaaaccccccctcccccgcttctggccacagcacttaaacacatctctgccaaaccccaaaaacaaagaaccctaacaccagcctaaccagatttcaaattttatcttttggcggtatgcacttttaacagtcaccccccaactaacacattattttcccctcccactcccatactactaatctcatcaatacaacccccgcccatcctacccagcacacacacaccgctgctaaccccataccccgaaccaaccaaaccccaaagacaccccccacagtttatgtagcttacctcctcaaagcaatacactgaaaatgtttagacgggctcacatcaccccataaacaaataggtttggtcctagcctttctattagctcttagtaagattacacatgcaagcatccccgttccagtgagttcaccctctaaatcaccacgatcaaaaggaacaagcatcaagcacgcagcaatgcagctcaaaacgcttagcctagccacacccccacgggaaacagcagtgattaacctttagcaataaacgaaagtttaactaagctatactaaccccagggttggtcaatttcgtgccagccaccgcggtcacacgattaacccaagtcaatagaagccggcgtaaagagtgttttagatcaccccctccccaataaagctaaaactcacctgagttgtaaaaaactccagttgacacaaaatagactacgaaagtggctttaacatatctgaacacacaatagctaagacccaaactgggattagataccccactatgcttagccctaaacctcaacagttaaatcaacaaaactgctcgccagaacactacgagccacagcttaaaactcaaaggacctggcggtgcttcatatccctctagaggagcctgttctgtaatcgataaaccccgatcaacctcaccacctcttgctcagcctatataccgccatcttcagcaaaccctgatgaaggctacaaagtaagcgcaagtacccacgtaaagacgttaggtcaaggtgtagcccatgaggtggcaagaaatgggctacattttctaccccagaaaactacgatagcccttatgaaacttaagggtcgaaggtggatttagcagtaaactaagagtagagtgcttagttgaacagggccctgaagcgcgtacacaccgcccgtcaccctcctcaagtatacttcaaaggacatttaactaaaacccctacgcatttatatagaggagacaagtcgtaacatggtaagtgtactggaaagtgcacttggacgaaccagagtgtagcttaacacaaagcacccaacttacacttaggagatttcaacttaacttgaccgctctgagctaaacctagccccaaacccactccaccttactaccagacaaccttagccaaaccatttacccaaataaagtataggcgatagaaattgaaacctggcgcaatagatatagtaccgcaagggaaagatgaaaaattataaccaagcataatatagcaaggactaacccctataccttctgcataatgaattaactagaaataactttgcaaggagagccaaagctaagacccccgaaaccagacgagctacctaagaacagctaaaagagcacacccgtctatgtagcaaaatagtgggaagatttataggtagaggcgacaaacctaccgagcctggtgatagctggttgtccaagatagaatcttagttcaactttaaatttgcccacagaacccatctaaatccccttgtaaatttaactgttagtccaaagaggaacagctctttggacactaggaaaaaaccttgtagagagagtaaaaaatttaacacccatagtaggcctaaaagcagccaccaattaagaaagcgttcaagctcaacacccactacctaaaaaatcccaaacatataactgaactcctcacacccaattggaccaatctatcaccctatagaagaactaatgttagtataagtaacatgaaaacattctcctccgcataagcctgcgtcagattaaaacactgaactgacaattaacagcccaatatctacaatcaaccaacaagtcattattaccctcactgtcaacccaacacaggcatgctcataaggaaaggttaaaaaaagtaaaaggaactcggcaaatcttaccccgcctgtttaccaaaaacatcacctctagcatcaccagtattagaggcaccgcctgcccagtgacacatgtttaacggccgcggtaccctaaccgtgcaaaggtagcataatcacttgttccttaaatagggacctgtatgaatggctccacgagggttcagctgtctcttacttttaaccagtgaaattgacctgcccgtgaagaggcgggcataacacagcaagacgagaagaccctatggagctttaatttattaatgcaaacagtacctaacaaacccacaggtcctaaactaccaaacctgcattaaaaatttcggttggggcgacctcggagcagaacccaacctccgagcagtacatgctaagacttcaccagtcaaagcgaactactatactcaattgatccaataacttgaccaacggaacaagttaccctagggataacagcgcaatcctattctagagtccatatcaacaatagggtttacgacctcgatgttggatcaggacatcccgatggtgcagccgctattaaaggttcgtttgttcaacgattaaagtcctacgtgatctgagttcagaccggagtaatccaggtcggtttctatctacttcaaattcctccctgtacgaaaggacaagagaaataaggcctacttcacaaagcgccttcccccgtaaatgatatcatctcaacttagtattatacccacacccacccaagaacagggtttgttaagatggcagagcccggtaatcgcataaaacttaaaactttacagtcagaggttcaattcctcttcttaacaacatacccatggccaacctcctactcctcattgtacccattctaatcgcaatggcattcctaatgcttaccgaacgaaaaattctaggctatatacaactacgcaaaggccccaacgttgtaggcccctacgggctactacaacccttcgctgacgccataaaactcttcaccaaagagcccctaaaacccgccacatctaccatcaccctctacatcaccgccccgaccttagctctcaccatcgctcttctactatgaacccccctccccatacccaaccccctggtcaacctcaacctaggcctcctatttattctagccacctctagcctagccgtttactcaatcctctgatcagggtgagcatcaaactcaaactacgccctgatcggcgcactgcgagcagtagcccaaacaatctcatatgaagtcaccctagccatcattctactatcaacattactaataagtggctcctttaacctctccacccttatcacaacacaagaacacctctgattactcctgccatcatgacccttggccataatatgatttatctccacactagcagagaccaaccgaacccccttcgaccttgccgaaggggagtccgaactagtctcaggcttcaacatcgaatacgccgcaggccccttcgccctattcttcatagccgaatacacaaacattattataataaacaccctcaccactacaatcttcctaggaacaacatatgacgcactctcccctgaactctacacaacatattttgtcaccaagaccctacttctaacctccctgttcttatgaattcgaacagcatacccccgattccgctacgaccaactcatacacctcctatgaaaaaacttcctaccactcaccctagcattacttatatgatatgtctccatacccattacaatctccagcattccccctcaaacctaagaaatatgtctgataaaagagttactttgatagagtaaataataggagcttaaacccccttatttctaggactatgagaatcgaacccatccctgagaatccaaaattctccgtgccacctatcacaccccatcctaaagtaaggtcagctaaataagctatcgggcccataccccgaaaatgttggttatacccttcccgtactaattaatcccctggcccaacccgtcatctactctaccatctttgcaggcacactcatcacagcgctaagctcgcactgattttttacctgagtaggcctagaaataaacatgctagcttttattccagttctaaccaaaaaaataaaccctcgttccacagaagctgccatcaagtatttcctcacgcaagcaaccgcatccataatccttctaatagctatcctcttcaacaatatactctccggacaatgaaccataaccaatactaccaatcaatactcatcattaataatcataatagctatagcaataaaactaggaatagccccctttcacttctgagtcccagaggttacccaaggcacccctctgacatccggcctgcttcttctcacatgacaaaaactagcccccatctcaatcatataccaaatctctccctcactaaacgtaagccttctcctcactctctcaatcttatccatcatagcaggcagttgaggtggattaaaccaaacccagctacgcaaaatcttagcatactcctcaattacccacataggatgaataatagcagttctaccgtacaaccctaacataaccattcttaatttaactatttatattatcctaactactaccgcattcctactactcaacttaaactccagcaccacgaccctactactatctcgcacctgaaacaagctaacatgactaacacccttaattccatccaccctcctctccctaggaggcctgcccccgctaaccggctttttgcccaaatgggccattatcgaagaattcacaaaaaacaatagcctcatcatccccaccatcatagccaccatcaccctccttaacctctacttctacctacgcctaatctactccacctcaatcacactactccccatatctaacaacgtaaaaataaaatgacagtttgaacatacaaaacccaccccattcctccccacactcatcgcccttaccacgctactcctacctatctccccttttatactaataatcttatagaaatttaggttaaatacagaccaagagccttcaaagccctcagtaagttgcaatacttaatttctgtaacagctaaggactgcaaaaccccactctgcatcaactgaacgcaaatcagccactttaattaagctaagcccttactagaccaatgggacttaaacccacaaacacttagttaacagctaagcaccctaatcaactggcttcaatctacttctcccgccgccgggaaaaaaggcgggagaagccccggcaggtttgaagctgcttcttcgaatttgcaattcaatatgaaaatcacctcggagctggtaaaaagaggcctaacccctgtctttagatttacagtccaatgcttcactcagccattttacctcacccccactgatgttcgccgaccgttgactattctctacaaaccacaaagacattggaacactatacctattattcggcgcatgagctggagtcctaggcacagctctaagcctccttattcgagccgagctgggccagccaggcaaccttctaggtaacgaccacatctacaacgttatcgtcacagcccatgcatttgtaataatcttcttcatagtaatacccatcataatcggaggctttggcaactgactagttcccctaataatcggtgcccccgatatggcgtttccccgcataaacaacataagcttctgactcttacctccctctctcctactcctgctcgcatctgctatagtggaggccggagcaggaacaggttgaacagtctaccctcccttagcagggaactactcccaccctggagcctccgtagacctaaccatcttctccttacacctagcaggtgtctcctctatcttaggggccatcaatttcatcacaacaattatcaatataaaaccccctgccataacccaataccaaacgcccctcttcgtctgatccgtcctaatcacagcagtcctacttctcctatctctcccagtcctagctgctggcatcactatactactaacagaccgcaacctcaacaccaccttcttcgaccccgccggaggaggagaccccattctataccaacacctattctgatttttcggtcaccctgaagtttatattcttatcctaccaggcttcggaataatctcccatattgtaacttactactccggaaaaaaagaaccatttggatacataggtatggtctgagctatgatatcaattggcttcctagggtttatcgtgtgagcacaccatatatttacagtaggaatagacgtagacacacgagcatatttcacctccgctaccataatcatcgctatccccaccggcgtcaaagtatttagctgactcgccacactccacggaagcaatatgaaatgatctgctgcagtgctctgagccctaggattcatctttcttttcaccgtaggtggcctgactggcattgtattagcaaactcatcactagacatcgtactacacgacacgtactacgttgtagcccacttccactatgtcctatcaataggagctgtatttgccatcataggaggcttcattcactgatttcccctattctcaggctacaccctagaccaaacctacgccaaaatccatttcactatcatattcatcggcgtaaatctaactttcttcccacaacactttctcggcctatccggaatgccccgacgttactcggactaccccgatgcatacaccacatgaaacatcctatcatctgtaggctcattcatttctctaacagcagtaatattaataattttcatgatttgagaagccttcgcttcgaagcgaaaagtcctaatagtagaagaaccctccataaacctggagtgactatatggatgccccccaccctaccacacattcgaagaacccgtatacataaaatctagacaaaaaaggaaggaatcgaaccccccaaagctggtttcaagccaaccccatggcctccatgactttttcaaaaaggtattagaaaaaccatttcataactttgtcaaagttaaattataggctaaatcctatatatcttaatggcacatgcagcgcaagtaggtctacaagacgctacttcccctatcatagaagagcttatcacctttcatgatcacgccctcataatcattttccttatctgcttcctagtcctgtatgcccttttcctaacactcacaacaaaactaactaatactaacatctcagacgctcaggaaatagaaaccgtctgaactatcctgcccgccatcatcctagtcctcatcgccctcccatccctacgcatcctttacataacagacgaggtcaacgatccctcccttaccatcaaatcaattggccaccaatggtactgaacctacgagtacaccgactacggcggactaatcttcaactcctacatacttcccccattattcctagaaccaggcgacctgcgactccttgacgttgacaatcgagtagtactcccgattgaagcccccattcgtataataattacatcacaagacgtcttgcactcatgagctgtccccacattaggcttaaaaacagatgcaattcccggacgtctaaaccaaaccactttcaccgctacacgaccgggggtatactacggtcaatgctctgaaatctgtggagcaaaccacagtttcatgcccatcgtcctagaattaattcccctaaaaatctttgaaatagggcccgtatttaccctatagcaccccctctaccccctctagagcccactgtaaagctaacttagcattaaccttttaagttaaagattaagagaaccaacacctctttacagtgaaatgccccaactaaatactaccgtatggcccaccataattacccccatactccttacactattcctcatcacccaactaaaaatattaaacacaaactaccacctacctccctcaccaaagcccataaaaataaaaaattataacaaaccctgagaaccaaaatgaacgaaaatctgttcgcttcattcattgcccccacaatcctaggcctacccgccgcagtactgatcattctatttccccctctattgatccccacctccaaatatctcatcaacaaccgactaatcaccacccaacaatgactaatcaaactaacctcaaaacaaatgataaccatacacaacactaaaggacgaacctgatctcttatactagtatccttaatcatttttattgccacaactaacctcctcggactcctgcctcactcatttacaccaaccacccaactatctataaacctagccatggccatccccttatgagcgggcacagtgattataggctttcgctctaagattaaaaatgccctagcccacttcttaccacaaggcacacctacaccccttatccccatactagttattatcgaaaccatcagcctactcattcaaccaatagccctggccgtacgcctaaccgctaacattactgcaggccacctactcatgcacctaattggaagcgccaccctagcaatatcaaccattaaccttccctctacacttatcatcttcacaattctaattctactgactatcctagaaatcgctgtcgccttaatccaagcctacgttttcacacttctagtaagcctctacctgcacgacaacacataatgacccaccaatcacatgcctatcatatagtaaaacccagcccatgacccctaacaggggccctctcagccctcctaatgacctccggcctagccatgtgatttcacttccactccataacgctcctcatactaggcctactaaccaacacactaaccatataccaatgatggcgcgatgtaacacgagaaagcacataccaaggccaccacacaccacctgtccaaaaaggccttcgatacgggataatcctatttattacctcagaagtttttttcttcgcaggatttttctgagccttttaccactccagcctagcccctaccccccaattaggagggcactggcccccaacaggcatcaccccgctaaatcccctagaagtcccactcctaaacacatccgtattactcgcatcaggagtatcaatcacctgagctcaccatagtctaatagaaaacaaccgaaaccaaataattcaagcactgcttattacaattttactgggtctctattttaccctcctacaagcctcagagtacttcgagtctcccttcaccatttccgacggcatctacggctcaacattttttgtagccacaggcttccacggacttcacgtcattattggctcaactttcctcactatctgcttcatccgccaactaatatttcactttacatccaaacatcactttggcttcgaagccgccgcctgatactggcattttgtagatgtggtttgactatttctgtatgtctccatctattgatgagggtcttactcttttagtataaatagtaccgttaacttccaattaactagttttgacaacattcaaaaaagagtaataaacttcgccttaattttaataatcaacaccctcctagccttactactaataattattacattttgactaccacaactcaacggctacatagaaaaatccaccccttacgagtgcggcttcgaccctatatcccccgcccgcgtccctttctccataaaattcttcttagtagctattaccttcttattatttgatctagaaattgccctccttttacccctaccatgagccctacaaacaactaacctgccactaatagttatgtcatccctcttattaatcatcatcctagccctaagtctggcctatgagtgactacaaaaaggattagactgaaccgaattggtatatagtttaaacaaaacgaatgatttcgactcattaaattatgataatcatatttaccaaatgcccctcatttacataaatattatactagcatttaccatctcacttctaggaatactagtatatcgctcacacctcatatcctccctactatgcctagaaggaataatactatcgctgttcattatagctactctcataaccctcaacacccactccctcttagccaatattgtgcctattgccatactagtctttgccgcctgcgaagcagcggtgggcctagccctactagtctcaatctccaacacatatggcctagactacgtacataacctaaacctactccaatgctaaaactaatcgtcccaacaattatattactaccactgacatgactttccaaaaaacacataatttgaatcaacacaaccacccacagcctaattattagcatcatccctctactattttttaaccaaatcaacaacaacctatttagctgttccccaaccttttcctccgaccccctaacaacccccctcctaatactaactacctgactcctacccctcacaatcatggcaagccaacgccacttatccagtgaaccactatcacgaaaaaaactctacctctctatactaatctccctacaaatctccttaattataacattcacagccacagaactaatcatattttatatcttcttcgaaaccacacttatccccaccttggctatcatcacccgatgaggcaaccagccagaacgcctgaacgcaggcacatacttcctattctacaccctagtaggctcccttcccctactcatcgcactaatttacactcacaacaccctaggctcactaaacattctactactcactctcactgcccaagaactatcaaactcctgagccaacaacttaatatgactagcttacacaatagcttttatagtaaagatacctctttacggactccacttatgactccctaaagcccatgtcgaagcccccatcgctgggtcaatagtacttgccgcagtactcttaaaactaggcggctatggtataatacgcctcacactcattctcaaccccctgacaaaacacatagcctaccccttccttgtactatccctatgaggcataattataacaagctccatctgcctacgacaaacagacctaaaatcgctcattgcatactcttcaatcagccacatagccctcgtagtaacagccattctcatccaaaccccctgaagcttcaccggcgcagtcattctcataatcgcccacgggcttacatcctcattactattctgcctagcaaactcaaactacgaacgcactcacagtcgcatcataatcctctctcaaggacttcaaactctactcccactaatagctttttgatgacttctagcaagcctcgctaacctcgccttaccccccactattaacctactgggagaactctctgtgctagtaaccacgttctcctgatcaaatatcactctcctacttacaggactcaacatactagtcacagccctatactccctctacatatttaccacaacacaatggggctcactcacccaccacattaacaacataaaaccctcattcacacgagaaaacaccctcatgttcatacacctatcccccattctcctcctatccctcaaccccgacatcattaccgggttttcctcttgtaaatatagtttaaccaaaacatcagattgtgaatctgacaacagaggcttacgaccccttatttaccgagaaagctcacaagaactgctaactcatgcccccatgtctaacaacatggctttctcaacttttaaaggataacagctatccattggtcttaggccccaaaaattttggtgcaactccaaataaaagtaataaccatgcacactactataaccaccctaaccctgacttccctaattccccccatccttaccaccctcgttaaccctaacaaaaaaaactcatacccccattatgtaaaatccattgtcgcatccacctttattatcagtctcttccccacaacaatattcatgtgcctagaccaagaagttattatctcgaactgacactgagccacaacccaaacaacccagctctccctaagcttcaaactagactacttctccataatattcatccctgtagcattgttcgttacatggtccatcatagaattctcactgtgatatataaactcagacccaaacattaatcagttcttcaaatatctactcatcttcctaattaccatactaatcttagttaccgctaacaacctattccaactgttcatcggctgagagggcgtaggaattatatccttcttgctcatcagttgatgatacgcccgagcagatgccaacacagcagccattcaagcaatcctatacaaccgtatcggcgatatcggtttcatcctcgccttagcatgatttatcctacactccaactcatgagacccacaacaaatagcccttctaaacgctaatccaagcctcaccccactactaggcctcctcctagcagcagcaggcaaatcagcccaattaggtctccacccctgactcccctcagccatagaaggccccaccccagtctcagccctactccactcaagcactatagttgtagcaggaatcttcttactcatccgcttccaccccctagcagaaaatagcccactaatccaaactctaacactatgcttaggcgctatcaccactctgttcgcagcagtctgcgcccttacacaaaatgacatcaaaaaaatcgtagccttctccacttcaagtcaactaggactcataatagttacaatcggcatcaaccaaccacacctagcattcctgcacatctgtacccacgccttcttcaaagccatactatttatgtgctccgggtccatcatccacaaccttaacaatgaacaagatattcgaaaaataggaggactactcaaaaccatacctctcacttcaacctccctcaccattggcagcctagcattagcaggaatacctttcctcacaggtttctactccaaagaccacatcatcgaaaccgcaaacatatcatacacaaacgcctgagccctatctattactctcatcgctacctccctgacaagcgcctatagcactcgaataattcttctcaccctaacaggtcaacctcgcttccccacccttactaacattaacgaaaataaccccaccctactaaaccccattaaacgcctggcagccggaagcctattcgcaggatttctcattactaacaacatttcccccgcatcccccttccaaacaacaatccccctctacctaaaactcacagccctcgctgtcactttcctaggacttctaacagccctagacctcaactacctaaccaacaaacttaaaataaaatccccactatgcacattttatttctccaacatactcggattctaccctagcatcacacaccgcacaatcccctatctaggccttcttacgagccaaaacctgcccctactcctcctagacctaacctgactagaaaagctattacctaaaacaatttcacagcaccaaatctccacctccatcatcacctcaacccaaaaaggcataattaaactttacttcctctctttcttcttcccactcatcctaaccctactcctaatcacataacctattcccccgagcaatctcaattacaatatatacaccaacaaacaatgttcaaccagtaactactactaatcaacgcccataatcatacaaagcccccgcaccaataggatcctcccgaatcaaccctgacccctctccttcataaattattcagcttcctacactattaaagtttaccacaaccaccaccccatcatactctttcacccacagcaccaatcctacctccatcgctaaccccactaaaacactcaccaagacctcaacccctgacccccatgcctcaggatactcctcaatagccatcgctgtagtatatccaaagacaaccatcattccccctaaataaattaaaaaaactattaaacccatataacctcccccaaaattcagaataataacacacccgaccacaccgctaacaatcaatactaaacccccataaataggagaaggcttagaagaaaaccccacaaaccccattactaaacccacactcaacagaaacaaagcatacatcattattctcgcacggactacaaccacgaccaatgatatgaaaaaccatcgttgtatttcaactacaagaacaccaatgaccccaatacgcaaaactaaccccctaataaaattaattaaccactcattcatcgacctccccaccccatccaacatctccgcatgatgaaacttcggctcactccttggcgcctgcctgatcctccaaatcaccacaggactattcctagccatgcactactcaccagacgcctcaaccgccttttcatcaatcgcccacatcactcgagacgtaaattatggctgaatcatccgctaccttcacgccaatggcgcctcaatattctttatctgcctcttcctacacatcgggcgaggcctatattacggatcatttctctactcagaaacctgaaacatcggcattatcctcctgcttgcaactatagcaacagccttcataggctatgtcctcccgtgaggccaaatatcattctgaggggccacagtaattacaaacttactatccgccatcccatacattgggacagacctagttcaatgaatctgaggaggctactcagtagacagtcccaccctcacacgattctttacctttcacttcatcttgcccttcattattgcagccctagcaacactccacctcctattcttgcacgaaacgggatcaaacaaccccctaggaatcacctcccattccgataaaatcaccttccacccttactacacaatcaaagacgccctcggcttacttctcttccttctctccttaatgacattaacactattctcaccagacctcctaggcgacccagacaattataccctagccaaccccttaaacacccctccccacatcaagcccgaatgatatttcctattcgcctacacaattctccgatccgtccctaacaaactaggaggcgtccttgccctattactatccatcctcatcctagcaataatccccatcctccatatatccaaacaacaaagcataatatttcgcccactaagccaatcactttattgactcctagccgcagacctcctcattctaacctgaatcggaggacaaccagtaagctacccttttaccatcattggacaagtagcatccgtactatacttcacaacaatcctaatcctaataccaactatctccctaattgaaaacaaaatactcaaatgggcctgtccttgtagtataaactaatacaccagtcttgtaaaccggagatgaaaacctttttccaaggacaaatcagagaaaaagtctttaactccaccattagcacccaaagctaagattctaatttaaactattctctgttctttcatggggaagcagatttgggtaccacccaagtattgactcacccatcaacaaccgctatgtatttcgtacattactgccagccaccatgaatattgtacggtaccataaatacttgaccacctgtagtacataaaaacccaatccacatcaaaaccccctccccatgcttacaagcaagtacagcaatcaaccctcaactatcacacatcaactgcaactccaaagccacccctcacccactaggataccaacaaacctacccacccttaacagtacatagtacataaagccatttaccgtacatagcacattacagtcaaatcccttctcgtccccatggatgacccccctcagataggggtcccttgaccaccatcctccgtgaaatcaatatcccgcacaagagtgctactctcctcgctccgggcccataacacttgggggtagctaaagtgaactgtatccgacatctggttcctacttcagggtcataaagcctaaatagcccacacgttccccttaaataagacatcacgatg

SEQ ID NO: 131 - DNA, 16569 bp, Homo sapiens mitochondrial DNA
  insertion (3469)..(3470): 3469.1INS T
gatcacaggtctatcaccctattaaccactcacgggagctctccatgcatttggtattttcgtctggggggtatgcacgcgatagcattgcgagacgctggagccggagcaccctatgtcgcagtatctgtctttgattcctgcctcatcctattatttatcgcacctacgttcaatattacaggcgaacatacttactaaagtgtgttaattaattaatgcttgtaggacataataataacaattgaatgtctgcacagccactttccacacagacatcataacaaaaaatttccaccaaaccccccctcccccgcttctggccacagcacttaaacacatctctgccaaaccccaaaaacaaagaaccctaacaccagcctaaccagatttcaaattttatcttttggcggtatgcacttttaacagtcaccccccaactaacacattattttcccctcccactcccatactactaatctcatcaatacaacccccgcccatcctacccagcacacacacaccgctgctaaccccataccccgaaccaaccaaaccccaaagacaccccccacagtttatgtagcttacctcctcaaagcaatacactgaaaatgtttagacgggctcacatcaccccataaacaaataggtttggtcctagcctttctattagctcttagtaagattacacatgcaagcatccccgttccagtgagttcaccctctaaatcaccacgatcaaaaggaacaagcatcaagcacgcagcaatgcagctcaaaacgcttagcctagccacacccccacgggaaacagcagtgattaacctttagcaataaacgaaagtttaactaagctatactaaccccagggttggtcaatttcgtgccagccaccgcggtcacacgattaacccaagtcaatagaagccggcgtaaagagtgttttagatcaccccctccccaataaagctaaaactcacctgagttgtaaaaaactccagttgacacaaaatagactacgaaagtggctttaacatatctgaacacacaatagctaagacccaaactgggattagataccccactatgcttagccctaaacctcaacagttaaatcaacaaaactgctcgccagaacactacgagccacagcttaaaactcaaaggacctggcggtgcttcatatccctctagaggagcctgttctgtaatcgataaaccccgatcaacctcaccacctcttgctcagcctatataccgccatcttcagcaaaccctgatgaaggctacaaagtaagcgcaagtacccacgtaaagacgttaggtcaaggtgtagcccatgaggtggcaagaaatgggctacattttctaccccagaaaactacgatagcccttatgaaacttaagggtcgaaggtggatttagcagtaaactaagagtagagtgcttagttgaacagggccctgaagcgcgtacacaccgcccgtcaccctcctcaagtatacttcaaaggacatttaactaaaacccctacgcatttatatagaggagacaagtcgtaacatggtaagtgtactggaaagtgcacttggacgaaccagagtgtagcttaacacaaagcacccaacttacacttaggagatttcaacttaacttgaccgctctgagctaaacctagccccaaacccactccaccttactaccagacaaccttagccaaaccatttacccaaataaagtataggcgatagaaattgaaacctggcgcaatagatatagtaccgcaagggaaagatgaaaaattataaccaagcataatatagcaaggactaacccctataccttctgcataatgaattaactagaaataactttgcaaggagagccaaagctaagacccccgaaaccagacgagctacctaagaacagctaaaagagcacacccgtctatgtagcaaaatagtgggaagatttataggtagaggcgacaaacctaccgagcctggtgatagctggttgtccaagatagaatcttagttcaactttaaatttgcccacagaaccctctaaatccccttgtaaatttaactgttagtccaaagaggaacagctctttggacactaggaaaaaaccttgtagagagagtaaaaaatttaacacccatagtaggcctaaaagcagccaccaattaagaaagcgttcaagctcaacacccactacctaaaaaatcccaaacatataactgaactcctcacacccaattggaccaatctatcaccctatagaagaactaatgttagtataagtaacatgaaaacattctcctccgcataagcctgcgtcagattaaaacactgaactgacaattaacagcccaatatctacaatcaaccaacaagtcattattaccctcactgtcaacccaacacaggcatgctcataaggaaaggttaaaaaaagtaaaaggaactcggcaaatcttaccccgcctgtttaccaaaaacatcacctctagcatcaccagtattagaggcaccgcctgcccagtgacacatgtttaacggccgcggtaccctaaccgtgcaaaggtagcataatcacttgttccttaaatagggacctgtatgaatggctccacgagggttcagctgtctcttacttttaaccagtgaaattgacctgcccgtgaagaggcgggcataacacagcaagacgagaagaccctatggagctttaatttattaatgcaaacagtacctaacaaacccacaggtcctaaactaccaaacctgcattaaaaatttcggttggggcgacctcggagcagaacccaacctccgagcagtacatgctaagacttcaccagtcaaagcgaactactatactcaattgatccaataacttgaccaacggaacaagttaccctagggataacagcgcaatcctattctagagtccatatcaacaatagggtttacgacctcgatgttggatcaggacatcccgatggtgcagccgctattaaaggttcgtttgttcaacgattaaagtcctacgtgatctgagttcagaccggagtaatccaggtcggtttctatctacttcaaattcctccctgtacgaaaggacaagagaaataaggcctacttcacaaagcgccttcccccgtaaatgatatcatctcaacttagtattatacccacacccacccaagaacagggtttgttaagatggcagagcccggtaatcgcataaaacttaaaactttacagtcagaggttcaattcctcttcttaacaacatacccatggccaacctcctactcctcattgtacccattctaatcgcaatggcattcctaatgcttaccgaacgaaaaattctaggctatatacaactacgcaaaggccccaacgttgtaggcccctacgggctactacaacccttcgctgacgccataaaacttcttcaccaaagagcccctaaaacccgccacatctaccatcaccctctacatcaccgccccgaccttagctctcaccatcgctcttctactatgaacccccctccccatacccaaccccctggtcaacctcaacctaggcctcctatttattctagccacctctagcctagccgtttactcaatcctctgatcagggtgagcatcaaactcaaactacgccctgatcggcgcactgcgagcagtagcccaaacaatctcatatgaagtcaccctagccatcattctactatcaacattactaataagtggctcctttaacctctccacccttatcacaacacaagaacacctctgattactcctgccatcatgacccttggccataatatgatttatctccacactagcagagaccaaccgaacccccttcgaccttgccgaaggggagtccgaactagtctcaggcttcaacatcgaatacgccgcaggccccttcgccctattcttcatagccgaatacacaaacattattataataaacaccctcaccactacaatcttcctaggaacaacatatgacgcactctcccctgaactctacacaacatattttgtcaccaagaccctacttctaacctccctgttcttatgaattcgaacagcatacccccgattccgctacgaccaactcatacacctcctatgaaaaaacttcctaccactcaccctagcattacttatatgatatgtctccatacccattacaatctccagcattccccctcaaacctaagaaatatgtctgataaaagagttactttgatagagtaaataataggagcttaaacccccttatttctaggactatgagaatcgaacccatccctgagaatccaaaattctccgtgccacctatcacaccccatcctaaagtaaggtcagctaaataagctatcgggcccataccccgaaaatgttggttatacccttcccgtactaattaatcccctggcccaacccgtcatctactctaccatctttgcaggcacactcatcacagcgctaagctcgcactgattttttacctgagtaggcctagaaataaacatgctagcttttattccagttctaaccaaaaaaataaaccctcgttccacagaagctgccatcaagtatttcctcacgcaagcaaccgcatccataatccttctaatagctatcctcttcaacaatatactctccggacaatgaaccataaccaatactaccaatcaatactcatcattaataatcataatagctatagcaataaaactaggaatagccccctttcacttctgagtcccagaggttacccaaggcacccctctgacatccggcctgcttcttctcacatgacaaaaactagcccccatctcaatcatataccaaatctctccctcactaaacgtaagccttctcctcactctctcaatcttatccatcatagcaggcagttgaggtggattaaaccaaacccagctacgcaaaatcttagcatactcctcaattacccacataggatgaataatagcagttctaccgtacaaccctaacataaccattcttaatttaactatttatattatcctaactactaccgcattcctactactcaacttaaactccagcaccacgaccctactactatctcgcacctgaaacaagctaacatgactaacacccttaattccatccaccctcctctccctaggaggcctgcccccgctaaccggctttttgcccaaatgggccattatcgaagaattcacaaaaaacaatagcctcatcatccccaccatcatagccaccatcaccctccttaacctctacttctacctacgcctaatctactccacctcaatcacactactccccatatctaacaacgtaaaaataaaatgacagtttgaacatacaaaacccaccccattcctccccacactcatcgcccttaccacgctactcctacctatctccccttttatactaataatcttatagaaatttaggttaaatacagaccaagagccttcaaagccctcagtaagttgcaatacttaatttctgtaacagctaaggactgcaaaaccccactctgcatcaactgaacgcaaatcagccactttaattaagctaagcccttactagaccaatgggacttaaacccacaaacacttagttaacagctaagcaccctaatcaactggcttcaatctacttctcccgccgccgggaaaaaaggcgggagaagccccggcaggtttgaagctgcttcttcgaatttgcaattcaatatgaaaatcacctcggagctggtaaaaagaggcctaacccctgtctttagatttacagtccaatgcttcactcagccattttacctcacccccactgatgttcgccgaccgttgactattctctacaaaccacaaagacattggaacactatacctattattcggcgcatgagctggagtcctaggcacagctctaagcctccttattcgagccgagctgggccagccaggcaaccttctaggtaacgaccacatctacaacgttatcgtcacagcccatgcatttgtaataatcttcttcatagtaatacccatcataatcggaggctttggcaactgactagttcccctaataatcggtgcccccgatatggcgtttccccgcataaacaacataagcttctgactcttacctccctctctcctactcctgctcgcatctgctatagtggaggccggagcaggaacaggttgaacagtctaccctcccttagcagggaactactcccaccctggagcctccgtagacctaaccatcttctccttacacctagcaggtgtctcctctatcttaggggccatcaatttcatcacaacaattatcaatataaaaccccctgccataacccaataccaaacgcccctcttcgtctgatccgtcctaatcacagcagtcctacttctcctatctctcccagtcctagctgctggcatcactatactactaacagaccgcaacctcaacaccaccttcttcgaccccgccggaggaggagaccccattctataccaacacctattctgatttttcggtcaccctgaagtttatattcttatcctaccaggcttcggaataatctcccatattgtaacttactactccggaaaaaaagaaccatttggatacataggtatggtctgagctatgatatcaattggcttcctagggtttatcgtgtgagcacaccatatatttacagtaggaatagacgtagacacacgagcatatttcacctccgctaccataatcatcgctatccccaccggcgtcaaagtatttagctgactcgccacactccacggaagcaatatgaaatgatctgctgcagtgctctgagccctaggattcatctttcttttcaccgtaggtggcctgactggcattgtattagcaaactcatcactagacatcgtactacacgacacgtactacgttgtagcccacttccactatgtcctatcaataggagctgtatttgccatcataggaggcttcattcactgatttcccctattctcaggctacaccctagaccaaacctacgccaaaatccatttcactatcatattcatcggcgtaaatctaactttcttcccacaacactttctcggcctatccggaatgccccgacgttactcggactaccccgatgcatacaccacatgaaacatcctatcatctgtaggctcattcatttctctaacagcagtaatattaataattttcatgatttgagaagccttcgcttcgaagcgaaaagtcctaatagtagaagaaccctccataaacctggagtgactatatggatgccccccaccctaccacacattcgaagaacccgtatacataaaatctagacaaaaaaggaaggaatcgaaccccccaaagctggtttcaagccaaccccatggcctccatgactttttcaaaaaggtattagaaaaaccatttcataactttgtcaaagttaaattataggctaaatcctatatatcttaatggcacatgcagcgcaagtaggtctacaagacgctacttcccctatcatagaagagcttatcacctttcatgatcacgccctcataatcattttccttatctgcttcctagtcctgtatgcccttttcctaacactcacaacaaaactaactaatactaacatctcagacgctcaggaaatagaaaccgtctgaactatcctgcccgccatcatcctagtcctcatcgccctcccatccctacgcatcctttacataacagacgaggtcaacgatccctcccttaccatcaaatcaattggccaccaatggtactgaacctacgagtacaccgactacggcggactaatcttcaactcctacatacttcccccattattcctagaaccaggcgacctgcgactccttgacgttgacaatcgagtagtactcccgattgaagcccccattcgtataataattacatcacaagacgtcttgcactcatgagctgtccccacattaggcttaaaaacagatgcaattcccggacgtctaaaccaaaccactttcaccgctacacgaccgggggtatactacggtcaatgctctgaaatctgtggagcaaaccacagtttcatgcccatcgtcctagaattaattcccctaaaaatctttgaaatagggcccgtatttaccctatagcaccccctctaccccctctagagcccactgtaaagctaacttagcattaaccttttaagttaaagattaagagaaccaacacctctttacagtgaaatgccccaactaaatactaccgtatggcccaccataattacccccatactccttacactattcctcatcacccaactaaaaatattaaacacaaactaccacctacctccctcaccaaagcccataaaaataaaaaattataacaaaccctgagaaccaaaatgaacgaaaatctgttcgcttcattcattgcccccacaatcctaggcctacccgccgcagtactgatcattctatttccccctctattgatccccacctccaaatatctcatcaacaaccgactaatcaccacccaacaatgactaatcaaactaacctcaaaacaaatgataaccatacacaacactaaaggacgaacctgatctcttatactagtatccttaatcatttttattgccacaactaacctcctcggactcctgcctcactcatttacaccaaccacccaactatctataaacctagccatggccatccccttatgagcgggcacagtgattataggctttcgctctaagattaaaaatgccctagcccacttcttaccacaaggcacacctacaccccttatccccatactagttattatcgaaaccatcagcctactcattcaaccaatagccctggccgtacgcctaaccgctaacattactgcaggccacctactcatgcacctaattggaagcgccaccctagcaatatcaaccattaaccttccctctacacttatcatcttcacaattctaattctactgactatcctagaaatcgctgtcgccttaatccaagcctacgttttcacacttctagtaagcctctacctgcacgacaacacataatgacccaccaatcacatgcctatcatatagtaaaacccagcccatgacccctaacaggggccctctcagccctcctaatgacctccggcctagccatgtgatttcacttccactccataacgctcctcatactaggcctactaaccaacacactaaccatataccaatgatggcgcgatgtaacacgagaaagcacataccaaggccaccacacaccacctgtccaaaaaggccttcgatacgggataatcctatttattacctcagaagtttttttcttcgcaggatttttctgagccttttaccactccagcctagcccctaccccccaattaggagggcactggcccccaacaggcatcaccccgctaaatcccctagaagtcccactcctaaacacatccgtattactcgcatcaggagtatcaatcacctgagctcaccatagtctaatagaaaacaaccgaaaccaaataattcaagcactgcttattacaattttactgggtctctattttaccctcctacaagcctcagagtacttcgagtctcccttcaccatttccgacggcatctacggctcaacattttttgtagccacaggcttccacggacttcacgtcattattggctcaactttcctcactatctgcttcatccgccaactaatatttcactttacatccaaacatcactttggcttcgaagccgccgcctgatactggcattttgtagatgtggtttgactatttctgtatgtctccatctattgatgagggtcttactcttttagtataaatagtaccgttaacttccaattaactagttttgacaacattcaaaaaagagtaataaacttcgccttaattttaataatcaacaccctcctagccttactactaataattattacattttgactaccacaactcaacggctacatagaaaaatccaccccttacgagtgcggcttcgaccctatatcccccgcccgcgtccctttctccataaaattcttcttagtagctattaccttcttattatttgatctagaaattgccctccttttacccctaccatgagccctacaaacaactaacctgccactaatagttatgtcatccctcttattaatcatcatcctagccctaagtctggcctatgagtgactacaaaaaggattagactgaaccgaattggtatatagtttaaacaaaacgaatgatttcgactcattaaattatgataatcatatttaccaaatgcccctcatttacataaatattatactagcatttaccatctcacttctaggaatactagtatatcgctcacacctcatatcctccctactatgcctagaaggaataatactatcgctgttcattatagctactctcataaccctcaacacccactccctcttagccaatattgtgcctattgccatactagtctttgccgcctgcgaagcagcggtgggcctagccctactagtctcaatctccaacacatatggcctagactacgtacataacctaaacctactccaatgctaaaactaatcgtcccaacaattatattactaccactgacatgactttccaaaaaacacataatttgaatcaacacaaccacccacagcctaattattagcatcatccctctactattttttaaccaaatcaacaacaacctatttagctgttccccaaccttttcctccgaccccctaacaacccccctcctaatactaactacctgactcctacccctcacaatcatggcaagccaacgccacttatccagtgaaccactatcacgaaaaaaactctacctctctatactaatctccctacaaatctccttaattataacattcacagccacagaactaatcatattttatatcttcttcgaaaccacacttatccccaccttggctatcatcacccgatgaggcaaccagccagaacgcctgaacgcaggcacatacttcctattctacaccctagtaggctcccttcccctactcatcgcactaatttacactcacaacaccctaggctcactaaacattctactactcactctcactgcccaagaactatcaaactcctgagccaacaacttaatatgactagcttacacaatagcttttatagtaaagatacctctttacggactccacttatgactccctaaagcccatgtcgaagcccccatcgctgggtcaatagtacttgccgcagtactcttaaaactaggcggctatggtataatacgcctcacactcattctcaaccccctgacaaaacacatagcctaccccttccttgtactatccctatgaggcataattataacaagctccatctgcctacgacaaacagacctaaaatcgctcattgcatactcttcaatcagccacatagccctcgtagtaacagccattctcatccaaaccccctgaagcttcaccggcgcagtcattctcataatcgcccacgggcttacatcctcattactattctgcctagcaaactcaaactacgaacgcactcacagtcgcatcataatcctctctcaaggacttcaaactctactcccactaatagctttttgatgacttctagcaagcctcgctaacctcgccttaccccccactattaacctactgggagaactctctgtgctagtaaccacgttctcctgatcaaatatcactctcctacttacaggactcaacatactagtcacagccctatactccctctacatatttaccacaacacaatggggctcactcacccaccacattaacaacataaaaccctcattcacacgagaaaacaccctcatgttcatacacctatcccccattctcctcctatccctcaaccccgacatcattaccgggttttcctcttgtaaatatagtttaaccaaaacatcagattgtgaatctgacaacagaggcttacgaccccttatttaccgagaaagctcacaagaactgctaactcatgcccccatgtctaacaacatggctttctcaacttttaaaggataacagctatccattggtcttaggccccaaaaattttggtgcaactccaaataaaagtaataaccatgcacactactataaccaccctaaccctgacttccctaattccccccatccttaccaccctcgttaaccctaacaaaaaaaactcatacccccattatgtaaaatccattgtcgcatccacctttattatcagtctcttccccacaacaatattcatgtgcctagaccaagaagttattatctcgaactgacactgagccacaacccaaacaacccagctctccctaagcttcaaactagactacttctccataatattcatccctgtagcattgttcgttacatggtccatcatagaattctcactgtgatatataaactcagacccaaacattaatcagttcttcaaatatctactcatcttcctaattaccatactaatcttagttaccgctaacaacctattccaactgttcatcggctgagagggcgtaggaattatatccttcttgctcatcagttgatgatacgcccgagcagatgccaacacagcagccattcaagcaatcctatacaaccgtatcggcgatatcggtttcatcctcgccttagcatgatttatcctacactccaactcatgagacccacaacaaatagcccttctaaacgctaatccaagcctcaccccactactaggcctcctcctagcagcagcaggcaaatcagcccaattaggtctccacccctgactcccctcagccatagaaggccccaccccagtctcagccctactccactcaagcactatagttgtagcaggaatcttcttactcatccgcttccaccccctagcagaaaatagcccactaatccaaactctaacactatgcttaggcgctatcaccactctgttcgcagcagtctgcgcccttacacaaaatgacatcaaaaaaatcgtagccttctccacttcaagtcaactaggactcataatagttacaatcggcatcaaccaaccacacctagcattcctgcacatctgtacccacgccttcttcaaagccatactatttatgtgctccgggtccatcatccacaaccttaacaatgaacaagatattcgaaaaataggaggactactcaaaaccatacctctcacttcaacctccctcaccattggcagcctagcattagcaggaatacctttcctcacaggtttctactccaaagaccacatcatcgaaaccgcaaacatatcatacacaaacgcctgagccctatctattactctcatcgctacctccctgacaagcgcctatagcactcgaataattcttctcaccctaacaggtcaacctcgcttccccacccttactaacattaacgaaaataaccccaccctactaaaccccattaaacgcctggcagccggaagcctattcgcaggatttctcattactaacaacatttcccccgcatcccccttccaaacaacaatccccctctacctaaaactcacagccctcgctgtcactttcctaggacttctaacagccctagacctcaactacctaaccaacaaacttaaaataaaatccccactatgcacattttatttctccaacatactcggattctaccctagcatcacacaccgcacaatcccctatctaggccttcttacgagccaaaacctgcccctactcctcctagacctaacctgactagaaaagctattacctaaaacaatttcacagcaccaaatctccacctccatcatcacctcaacccaaaaaggcataattaaactttacttcctctctttcttcttcccactcatcctaaccctactcctaatcacataacctattcccccgagcaatctcaattacaatatatacaccaacaaacaatgttcaaccagtaactactactaatcaacgcccataatcatacaaagcccccgcaccaataggatcctcccgaatcaaccctgacccctctccttcataaattattcagcttcctacactattaaagtttaccacaaccaccaccccatcatactctttcacccacagcaccaatcctacctccatcgctaaccccactaaaacactcaccaagacctcaacccctgacccccatgcctcaggatactcctcaatagccatcgctgtagtatatccaaagacaaccatcattccccctaaataaattaaaaaaactattaaacccatataacctcccccaaaattcagaataataacacacccgaccacaccgctaacaatcaatactaaacccccataaataggagaaggcttagaagaaaaccccacaaaccccattactaaacccacactcaacagaaacaaagcatacatcattattctcgcacggactacaaccacgaccaatgatatgaaaaaccatcgttgtatttcaactacaagaacaccaatgaccccaatacgcaaaactaaccccctaataaaattaattaaccactcattcatcgacctccccaccccatccaacatctccgcatgatgaaacttcggctcactccttggcgcctgcctgatcctccaaatcaccacaggactattcctagccatgcactactcaccagacgcctcaaccgccttttcatcaatcgcccacatcactcgagacgtaaattatggctgaatcatccgctaccttcacgccaatggcgcctcaatattctttatctgcctcttcctacacatcgggcgaggcctatattacggatcatttctctactcagaaacctgaaacatcggcattatcctcctgcttgcaactatagcaacagccttcataggctatgtcctcccgtgaggccaaatatcattctgaggggccacagtaattacaaacttactatccgccatcccatacattgggacagacctagttcaatgaatctgaggaggctactcagtagacagtcccaccctcacacgattctttacctttcacttcatcttgcccttcattattgcagccctagcaacactccacctcctattcttgcacgaaacgggatcaaacaaccccctaggaatcacctcccattccgataaaatcaccttccacccttactacacaatcaaagacgccctcggcttacttctcttccttctctccttaatgacattaacactattctcaccagacctcctaggcgacccagacaattataccctagccaaccccttaaacacccctccccacatcaagcccgaatgatatttcctattcgcctacacaattctccgatccgtccctaacaaactaggaggcgtccttgccctattactatccatcctcatcctagcaataatccccatcctccatatatccaaacaacaaagcataatatttcgcccactaagccaatcactttattgactcctagccgcagacctcctcattctaacctgaatcggaggacaaccagtaagctacccttttaccatcattggacaagtagcatccgtactatacttcacaacaatcctaatcctaataccaactatctccctaattgaaaacaaaatactcaaatgggcctgtccttgtagtataaactaatacaccagtcttgtaaaccggagatgaaaacctttttccaaggacaaatcagagaaaaagtctttaactccaccattagcacccaaagctaagattctaatttaaactattctctgttctttcatggggaagcagatttgggtaccacccaagtattgactcacccatcaacaaccgctatgtatttcgtacattactgccagccaccatgaatattgtacggtaccataaatacttgaccacctgtagtacataaaaacccaatccacatcaaaaccccctccccatgcttacaagcaagtacagcaatcaaccctcaactatcacacatcaactgcaactccaaagccacccctcacccactaggataccaacaaacctacccacccttaacagtacatagtacataaagccatttaccgtacatagcacattacagtcaaatcccttctcgtccccatggatgacccccctcagataggggtcccttgaccaccatcctccgtgaaatcaatatcccgcacaagagtgctactctcctcgctccgggcccataacacttgggggtagctaaagtgaactgtatccgacatctggttcctacttcagggtcataaagcctaaatagcccacacgttccccttaaataagacatcacgatg

SEQ ID NO: 132 - DNA, 16569 bp, Homo sapiens mitochondrial DNA
  insertion (3744)..(3745): 3744.1INS T
gatcacaggtctatcaccctattaaccactcacgggagctctccatgcatttggtattttcgtctggggggtatgcacgcgatagcattgcgagacgctggagccggagcaccctatgtcgcagtatctgtctttgattcctgcctcatcctattatttatcgcacctacgttcaatattacaggcgaacatacttactaaagtgtgttaattaattaatgcttgtaggacataataataacaattgaatgtctgcacagccactttccacacagacatcataacaaaaaatttccaccaaaccccccctcccccgcttctggccacagcacttaaacacatctctgccaaaccccaaaaacaaagaaccctaacaccagcctaaccagatttcaaattttatcttttggcggtatgcacttttaacagtcaccccccaactaacacattattttcccctcccactcccatactactaatctcatcaatacaacccccgcccatcctacccagcacacacacaccgctgctaaccccataccccgaaccaaccaaaccccaaagacaccccccacagtttatgtagcttacctcctcaaagcaatacactgaaaatgtttagacgggctcacatcaccccataaacaaataggtttggtcctagcctttctattagctcttagtaagattacacatgcaagcatccccgttccagtgagttcaccctctaaatcaccacgatcaaaaggaacaagcatcaagcacgcagcaatgcagctcaaaacgcttagcctagccacacccccacgggaaacagcagtgattaacctttagcaataaacgaaagtttaactaagctatactaaccccagggttggtcaatttcgtgccagccaccgcggtcacacgattaacccaagtcaatagaagccggcgtaaagagtgttttagatcaccccctccccaataaagctaaaactcacctgagttgtaaaaaactccagttgacacaaaatagactacgaaagtggctttaacatatctgaacacacaatagctaagacccaaactgggattagataccccactatgcttagccctaaacctcaacagttaaatcaacaaaactgctcgccagaacactacgagccacagcttaaaactcaaaggacctggcggtgcttcatatccctctagaggagcctgttctgtaatcgataaaccccgatcaacctcaccacctcttgctcagcctatataccgccatcttcagcaaaccctgatgaaggctacaaagtaagcgcaagtacccacgtaaagacgttaggtcaaggtgtagcccatgaggtggcaagaaatgggctacattttctaccccagaaaactacgatagcccttatgaaacttaagggtcgaaggtggatttagcagtaaactaagagtagagtgcttagttgaacagggccctgaagcgcgtacacaccgcccgtcaccctcctcaagtatacttcaaaggacatttaactaaaacccctacgcatttatatagaggagacaagtcgtaacatggtaagtgtactggaaagtgcacttggacgaaccagagtgtagcttaacacaaagcacccaacttacacttaggagatttcaacttaacttgaccgctctgagctaaacctagccccaaacccactccaccttactaccagacaaccttagccaaaccatttacccaaataaagtataggcgatagaaattgaaacctggcgcaatagatatagtaccgcaagggaaagatgaaaaattataaccaagcataatatagcaaggactaacccctataccttctgcataatgaattaactagaaataactttgcaaggagagccaaagctaagacccccgaaaccagacgagctacctaagaacagctaaaagagcacacccgtctatgtagcaaaatagtgggaagatttataggtagaggcgacaaacctaccgagcctggtgatagctggttgtccaagatagaatcttagttcaactttaaatttgcccacagaaccctctaaatccccttgtaaatttaactgttagtccaaagaggaacagctctttggacactaggaaaaaaccttgtagagagagtaaaaaatttaacacccatagtaggcctaaaagcagccaccaattaagaaagcgttcaagctcaacacccactacctaaaaaatcccaaacatataactgaactcctcacacccaattggaccaatctatcaccctatagaagaactaatgttagtataagtaacatgaaaacattctcctccgcataagcctgcgtcagattaaaacactgaactgacaattaacagcccaatatctacaatcaaccaacaagtcattattaccctcactgtcaacccaacacaggcatgctcataaggaaaggttaaaaaaagtaaaaggaactcggcaaatcttaccccgcctgtttaccaaaaacatcacctctagcatcaccagtattagaggcaccgcctgcccagtgacacatgtttaacggccgcggtaccctaaccgtgcaaaggtagcataatcacttgttccttaaatagggacctgtatgaatggctccacgagggttcagctgtctcttacttttaaccagtgaaattgacctgcccgtgaagaggcgggcataacacagcaagacgagaagaccctatggagctttaatttattaatgcaaacagtacctaacaaacccacaggtcctaaactaccaaacctgcattaaaaatttcggttggggcgacctcggagcagaacccaacctccgagcagtacatgctaagacttcaccagtcaaagcgaactactatactcaattgatccaataacttgaccaacggaacaagttaccctagggataacagcgcaatcctattctagagtccatatcaacaatagggtttacgacctcgatgttggatcaggacatcccgatggtgcagccgctattaaaggttcgtttgttcaacgattaaagtcctacgtgatctgagttcagaccggagtaatccaggtcggtttctatctacttcaaattcctccctgtacgaaaggacaagagaaataaggcctacttcacaaagcgccttcccccgtaaatgatatcatctcaacttagtattatacccacacccacccaagaacagggtttgttaagatggcagagcccggtaatcgcataaaacttaaaactttacagtcagaggttcaattcctcttcttaacaacatacccatggccaacctcctactcctcattgtacccattctaatcgcaatggcattcctaatgcttaccgaacgaaaaattctaggctatatacaactacgcaaaggccccaacgttgtaggcccctacgggctactacaacccttcgctgacgccataaaactcttcaccaaagagcccctaaaacccgccacatctaccatcaccctctacatcaccgccccgaccttagctctcaccatcgctcttctactatgaacccccctccccatacccaaccccctggtcaacctcaacctaggcctcctatttattctagccacctctagcctagccgtttactcaatcctctgatcagggtgagcatcaaactcaaactacgccctgatcggcgcactgcgagcagtagcccaaacaatctcatatgaagtcaccctatgccatcattctactatcaacattactaataagtggctcctttaacctctccacccttatcacaacacaagaacacctctgattactcctgccatcatgacccttggccataatatgatttatctccacactagcagagaccaaccgaacccccttcgaccttgccgaaggggagtccgaactagtctcaggcttcaacatcgaatacgccgcaggccccttcgccctattcttcatagccgaatacacaaacattattataataaacaccctcaccactacaatcttcctaggaacaacatatgacgcactctcccctgaactctacacaacatattttgtcaccaagaccctacttctaacctccctgttcttatgaattcgaacagcatacccccgattccgctacgaccaactcatacacctcctatgaaaaaacttcctaccactcaccctagcattacttatatgatatgtctccatacccattacaatctccagcattccccctcaaacctaagaaatatgtctgataaaagagttactttgatagagtaaataataggagcttaaacccccttatttctaggactatgagaatcgaacccatccctgagaatccaaaattctccgtgccacctatcacaccccatcctaaagtaaggtcagctaaataagctatcgggcccataccccgaaaatgttggttatacccttcccgtactaattaatcccctggcccaacccgtcatctactctaccatctttgcaggcacactcatcacagcgctaagctcgcactgattttttacctgagtaggcctagaaataaacatgctagcttttattccagttctaaccaaaaaaataaaccctcgttccacagaagctgccatcaagtatttcctcacgcaagcaaccgcatccataatccttctaatagctatcctcttcaacaatatactctccggacaatgaaccataaccaatactaccaatcaatactcatcattaataatcataatagctatagcaataaaactaggaatagccccctttcacttctgagtcccagaggttacccaaggcacccctctgacatccggcctgcttcttctcacatgacaaaaactagcccccatctcaatcatataccaaatctctccctcactaaacgtaagccttctcctcactctctcaatcttatccatcatagcaggcagttgaggtggattaaaccaaacccagctacgcaaaatcttagcatactcctcaattacccacataggatgaataatagcagttctaccgtacaaccctaacataaccattcttaatttaactatttatattatcctaactactaccgcattcctactactcaacttaaactccagcaccacgaccctactactatctcgcacctgaaacaagctaacatgactaacacccttaattccatccaccctcctctccctaggaggcctgcccccgctaaccggctttttgcccaaatgggccattatcgaagaattcacaaaaaacaatagcctcatcatccccaccatcatagccaccatcaccctccttaacctctacttctacctacgcctaatctactccacctcaatcacactactccccatatctaacaacgtaaaaataaaatgacagtttgaacatacaaaacccaccccattcctccccacactcatcgcccttaccacgctactcctacctatctccccttttatactaataatcttatagaaatttaggttaaatacagaccaagagccttcaaagccctcagtaagttgcaatacttaatttctgtaacagctaaggactgcaaaaccccactctgcatcaactgaacgcaaatcagccactttaattaagctaagcccttactagaccaatgggacttaaacccacaaacacttagttaacagctaagcaccctaatcaactggcttcaatctacttctcccgccgccgggaaaaaaggcgggagaagccccggcaggtttgaagctgcttcttcgaatttgcaattcaatatgaaaatcacctcggagctggtaaaaagaggcctaacccctgtctttagatttacagtccaatgcttcactcagccattttacctcacccccactgatgttcgccgaccgttgactattctctacaaaccacaaagacattggaacactatacctattattcggcgcatgagctggagtcctaggcacagctctaagcctccttattcgagccgagctgggccagccaggcaaccttctaggtaacgaccacatctacaacgttatcgtcacagcccatgcatttgtaataatcttcttcatagtaatacccatcataatcggaggctttggcaactgactagttcccctaataatcggtgcccccgatatggcgtttccccgcataaacaacataagcttctgactcttacctccctctctcctactcctgctcgcatctgctatagtggaggccggagcaggaacaggttgaacagtctaccctcccttagcagggaactactcccaccctggagcctccgtagacctaaccatcttctccttacacctagcaggtgtctcctctatcttaggggccatcaatttcatcacaacaattatcaatataaaaccccctgccataacccaataccaaacgcccctcttcgtctgatccgtcctaatcacagcagtcctacttctcctatctctcccagtcctagctgctggcatcactatactactaacagaccgcaacctcaacaccaccttcttcgaccccgccggaggaggagaccccattctataccaacacctattctgatttttcggtcaccctgaagtttatattcttatcctaccaggcttcggaataatctcccatattgtaacttactactccggaaaaaaagaaccatttggatacataggtatggtctgagctatgatatcaattggcttcctagggtttatcgtgtgagcacaccatatatttacagtaggaatagacgtagacacacgagcatatttcacctccgctaccataatcatcgctatccccaccggcgtcaaagtatttagctgactcgccacactccacggaagcaatatgaaatgatctgctgcagtgctctgagccctaggattcatctttcttttcaccgtaggtggcctgactggcattgtattagcaaactcatcactagacatcgtactacacgacacgtactacgttgtagcccacttccactatgtcctatcaataggagctgtatttgccatcataggaggcttcattcactgatttcccctattctcaggctacaccctagaccaaacctacgccaaaatccatttcactatcatattcatcggcgtaaatctaactttcttcccacaacactttctcggcctatccggaatgccccgacgttactcggactaccccgatgcatacaccacatgaaacatcctatcatctgtaggctcattcatttctctaacagcagtaatattaataattttcatgatttgagaagccttcgcttcgaagcgaaaagtcctaatagtagaagaaccctccataaacctggagtgactatatggatgccccccaccctaccacacattcgaagaacccgtatacataaaatctagacaaaaaaggaaggaatcgaaccccccaaagctggtttcaagccaaccccatggcctccatgactttttcaaaaaggtattagaaaaaccatttcataactttgtcaaagttaaattataggctaaatcctatatatcttaatggcacatgcagcgcaagtaggtctacaagacgctacttcccctatcatagaagagcttatcacctttcatgatcacgccctcataatcattttccttatctgcttcctagtcctgtatgcccttttcctaacactcacaacaaaactaactaatactaacatctcagacgctcaggaaatagaaaccgtctgaactatcctgcccgccatcatcctagtcctcatcgccctcccatccctacgcatcctttacataacagacgaggtcaacgatccctcccttaccatcaaatcaattggccaccaatggtactgaacctacgagtacaccgactacggcggactaatcttcaactcctacatacttcccccattattcctagaaccaggcgacctgcgactccttgacgttgacaatcgagtagtactcccgattgaagcccccattcgtataataattacatcacaagacgtcttgcactcatgagctgtccccacattaggcttaaaaacagatgcaattcccggacgtctaaaccaaaccactttcaccgctacacgaccgggggtatactacggtcaatgctctgaaatctgtggagcaaaccacagtttcatgcccatcgtcctagaattaattcccctaaaaatctttgaaatagggcccgtatttaccctatagcaccccctctaccccctctagagcccactgtaaagctaacttagcattaaccttttaagttaaagattaagagaaccaacacctctttacagtgaaatgccccaactaaatactaccgtatggcccaccataattacccccatactccttacactattcctcatcacccaactaaaaatattaaacacaaactaccacctacctccctcaccaaagcccataaaaataaaaaattataacaaaccctgagaaccaaaatgaacgaaaatctgttcgcttcattcattgcccccacaatcctaggcctacccgccgcagtactgatcattctatttccccctctattgatccccacctccaaatatctcatcaacaaccgactaatcaccacccaacaatgactaatcaaactaacctcaaaacaaatgataaccatacacaacactaaaggacgaacctgatctcttatactagtatccttaatcatttttattgccacaactaacctcctcggactcctgcctcactcatttacaccaaccacccaactatctataaacctagccatggccatccccttatgagcgggcacagtgattataggctttcgctctaagattaaaaatgccctagcccacttcttaccacaaggcacacctacaccccttatccccatactagttattatcgaaaccatcagcctactcattcaaccaatagccctggccgtacgcctaaccgctaacattactgcaggccacctactcatgcacctaattggaagcgccaccctagcaatatcaaccattaaccttccctctacacttatcatcttcacaattctaattctactgactatcctagaaatcgctgtcgccttaatccaagcctacgttttcacacttctagtaagcctctacctgcacgacaacacataatgacccaccaatcacatgcctatcatatagtaaaacccagcccatgacccctaacaggggccctctcagccctcctaatgacctccggcctagccatgtgatttcacttccactccataacgctcctcatactaggcctactaaccaacacactaaccatataccaatgatggcgcgatgtaacacgagaaagcacataccaaggccaccacacaccacctgtccaaaaaggccttcgatacgggataatcctatttattacctcagaagtttttttcttcgcaggatttttctgagccttttaccactccagcctagcccctaccccccaattaggagggcactggcccccaacaggcatcaccccgctaaatcccctagaagtcccactcctaaacacatccgtattactcgcatcaggagtatcaatcacctgagctcaccatagtctaatagaaaacaaccgaaaccaaataattcaagcactgcttattacaattttactgggtctctattttaccctcctacaagcctcagagtacttcgagtctcccttcaccatttccgacggcatctacggctcaacattttttgtagccacaggcttccacggacttcacgtcattattggctcaactttcctcactatctgcttcatccgccaactaatatttcactttacatccaaacatcactttggcttcgaagccgccgcctgatactggcattttgtagatgtggtttgactatttctgtatgtctccatctattgatgagggtcttactcttttagtataaatagtaccgttaacttccaattaactagttttgacaacattcaaaaaagagtaataaacttcgccttaattttaataatcaacaccctcctagccttactactaataattattacattttgactaccacaactcaacggctacatagaaaaatccaccccttacgagtgcggcttcgaccctatatcccccgcccgcgtccctttctccataaaattcttcttagtagctattaccttcttattatttgatctagaaattgccctccttttacccctaccatgagccctacaaacaactaacctgccactaatagttatgtcatccctcttattaatcatcatcctagccctaagtctggcctatgagtgactacaaaaaggattagactgaaccgaattggtatatagtttaaacaaaacgaatgatttcgactcattaaattatgataatcatatttaccaaatgcccctcatttacataaatattatactagcatttaccatctcacttctaggaatactagtatatcgctcacacctcatatcctccctactatgcctagaaggaataatactatcgctgttcattatagctactctcataaccctcaacacccactccctcttagccaatattgtgcctattgccatactagtctttgccgcctgcgaagcagcggtgggcctagccctactagtctcaatctccaacacatatggcctagactacgtacataacctaaacctactccaatgctaaaactaatcgtcccaacaattatattactaccactgacatgactttccaaaaaacacataatttgaatcaacacaaccacccacagcctaattattagcatcatccctctactattttttaaccaaatcaacaacaacctatttagctgttccccaaccttttcctccgaccccctaacaacccccctcctaatactaactacctgactcctacccctcacaatcatggcaagccaacgccacttatccagtgaaccactatcacgaaaaaaactctacctctctatactaatctccctacaaatctccttaattataacattcacagccacagaactaatcatattttatatcttcttcgaaaccacacttatccccaccttggctatcatcacccgatgaggcaaccagccagaacgcctgaacgcaggcacatacttcctattctacaccctagtaggctcccttcccctactcatcgcactaatttacactcacaacaccctaggctcactaaacattctactactcactctcactgcccaagaactatcaaactcctgagccaacaacttaatatgactagcttacacaatagcttttatagtaaagatacctctttacggactccacttatgactccctaaagcccatgtcgaagcccccatcgctgggtcaatagtacttgccgcagtactcttaaaactaggcggctatggtataatacgcctcacactcattctcaaccccctgacaaaacacatagcctaccccttccttgtactatccctatgaggcataattataacaagctccatctgcctacgacaaacagacctaaaatcgctcattgcatactcttcaatcagccacatagccctcgtagtaacagccattctcatccaaaccccctgaagcttcaccggcgcagtcattctcataatcgcccacgggcttacatcctcattactattctgcctagcaaactcaaactacgaacgcactcacagtcgcatcataatcctctctcaaggacttcaaactctactcccactaatagctttttgatgacttctagcaagcctcgctaacctcgccttaccccccactattaacctactgggagaactctctgtgctagtaaccacgttctcctgatcaaatatcactctcctacttacaggactcaacatactagtcacagccctatactccctctacatatttaccacaacacaatggggctcactcacccaccacattaacaacataaaaccctcattcacacgagaaaacaccctcatgttcatacacctatcccccattctcctcctatccctcaaccccgacatcattaccgggttttcctcttgtaaatatagtttaaccaaaacatcagattgtgaatctgacaacagaggcttacgaccccttatttaccgagaaagctcacaagaactgctaactcatgcccccatgtctaacaacatggctttctcaacttttaaaggataacagctatccattggtcttaggccccaaaaattttggtgcaactccaaataaaagtaataaccatgcacactactataaccaccctaaccctgacttccctaattccccccatccttaccaccctcgttaaccctaacaaaaaaaactcatacccccattatgtaaaatccattgtcgcatccacctttattatcagtctcttccccacaacaatattcatgtgcctagaccaagaagttattatctcgaactgacactgagccacaacccaaacaacccagctctccctaagcttcaaactagactacttctccataatattcatccctgtagcattgttcgttacatggtccatcatagaattctcactgtgatatataaactcagacccaaacattaatcagttcttcaaatatctactcatcttcctaattaccatactaatcttagttaccgctaacaacctattccaactgttcatcggctgagagggcgtaggaattatatccttcttgctcatcagttgatgatacgcccgagcagatgccaacacagcagccattcaagcaatcctatacaaccgtatcggcgatatcggtttcatcctcgccttagcatgatttatcctacactccaactcatgagacccacaacaaatagcccttctaaacgctaatccaagcctcaccccactactaggcctcctcctagcagcagcaggcaaatcagcccaattaggtctccacccctgactcccctcagccatagaaggccccaccccagtctcagccctactccactcaagcactatagttgtagcaggaatcttcttactcatccgcttccaccccctagcagaaaatagcccactaatccaaactctaacactatgcttaggcgctatcaccactctgttcgcagcagtctgcgcccttacacaaaatgacatcaaaaaaatcgtagccttctccacttcaagtcaactaggactcataatagttacaatcggcatcaaccaaccacacctagcattcctgcacatctgtacccacgccttcttcaaagccatactatttatgtgctccgggtccatcatccacaaccttaacaatgaacaagatattcgaaaaataggaggactactcaaaaccatacctctcacttcaacctccctcaccattggcagcctagcattagcaggaatacctttcctcacaggtttctactccaaagaccacatcatcgaaaccgcaaacatatcatacacaaacgcctgagccctatctattactctcatcgctacctccctgacaagcgcctatagcactcgaataattcttctcaccctaacaggtcaacctcgcttccccacccttactaacattaacgaaaataaccccaccctactaaaccccattaaacgcctggcagccggaagcctattcgcaggatttctcattactaacaacatttcccccgcatcccccttccaaacaacaatccccctctacctaaaactcacagccctcgctgtcactttcctaggacttctaacagccctagacctcaactacctaaccaacaaacttaaaataaaatccccactatgcacattttatttctccaacatactcggattctaccctagcatcacacaccgcacaatcccctatctaggccttcttacgagccaaaacctgcccctactcctcctagacctaacctgactagaaaagctattacctaaaacaatttcacagcaccaaatctccacctccatcatcacctcaacccaaaaaggcataattaaactttacttcctctctttcttcttcccactcatcctaaccctactcctaatcacataacctattcccccgagcaatctcaattacaatatatacaccaacaaacaatgttcaaccagtaactactactaatcaacgcccataatcatacaaagcccccgcaccaataggatcctcccgaatcaaccctgacccctctccttcataaattattcagcttcctacactattaaagtttaccacaaccaccaccccatcatactctttcacccacagcaccaatcctacctccatcgctaaccccactaaaacactcaccaagacctcaacccctgacccccatgcctcaggatactcctcaatagccatcgctgtagtatatccaaagacaaccatcattccccctaaataaattaaaaaaactattaaacccatataacctcccccaaaattcagaataataacacacccgaccacaccgctaacaatcaatactaaacccccataaataggagaaggcttagaagaaaaccccacaaaccccattactaaacccacactcaacagaaacaaagcatacatcattattctcgcacggactacaaccacgaccaatgatatgaaaaaccatcgttgtatttcaactacaagaacaccaatgaccccaatacgcaaaactaaccccctaataaaattaattaaccactcattcatcgacctccccaccccatccaacatctccgcatgatgaaacttcggctcactccttggcgcctgcctgatcctccaaatcaccacaggactattcctagccatgcactactcaccagacgcctcaaccgccttttcatcaatcgcccacatcactcgagacgtaaattatggctgaatcatccgctaccttcacgccaatggcgcctcaatattctttatctgcctcttcctacacatcgggcgaggcctatattacggatcatttctctactcagaaacctgaaacatcggcattatcctcctgcttgcaactatagcaacagccttcataggctatgtcctcccgtgaggccaaatatcattctgaggggccacagtaattacaaacttactatccgccatcccatacattgggacagacctagttcaatgaatctgaggaggctactcagtagacagtcccaccctcacacgattctttacctttcacttcatcttgcccttcattattgcagccctagcaacactccacctcctattcttgcacgaaacgggatcaaacaaccccctaggaatcacctcccattccgataaaatcaccttccacccttactacacaatcaaagacgccctcggcttacttctcttccttctctccttaatgacattaacactattctcaccagacctcctaggcgacccagacaattataccctagccaaccccttaaacacccctccccacatcaagcccgaatgatatttcctattcgcctacacaattctccgatccgtccctaacaaactaggaggcgtccttgccctattactatccatcctcatcctagcaataatccccatcctccatatatccaaacaacaaagcataatatttcgcccactaagccaatcactttattgactcctagccgcagacctcctcattctaacctgaatcggaggacaaccagtaagctacccttttaccatcattggacaagtagcatccgtactatacttcacaacaatcctaatcctaataccaactatctccctaattgaaaacaaaatactcaaatgggcctgtccttgtagtataaactaatacaccagtcttgtaaaccggagatgaaaacctttttccaaggacaaatcagagaaaaagtctttaactccaccattagcacccaaagctaagattctaatttaaactattctctgttctttcatggggaagcagatttgggtaccacccaagtattgactcacccatcaacaaccgctatgtatttcgtacattactgccagccaccatgaatattgtacggtaccataaatacttgaccacctgtagtacataaaaacccaatccacatcaaaaccccctccccatgcttacaagcaagtacagcaatcaaccctcaactatcacacatcaactgcaactccaaagccacccctcacccactaggataccaacaaacctacccacccttaacagtacatagtacataaagccatttaccgtacatagcacattacagtcaaatcccttctcgtccccatggatgacccccctcagataggggtcccttgaccaccatcctccgtgaaatcaatatcccgcacaagagtgctactctcctcgctccgggcccataacacttgggggtagctaaagtgaactgtatccgacatctggttcctacttcagggtcataaagcctaaatagcccacacgttccccttaaataagacatcacgatg

SEQ ID NO: 133 - DNA, 16569 bp, Homo sapiens mitochondrial DNA
  insertion (6917)..(6918): 6917.1INS T
gatcacaggtctatcaccctattaaccactcacgggagctctccatgcatttggtattttcgtctggggggtatgcacgcgatagcattgcgagacgctggagccggagcaccctatgtcgcagtatctgtctttgattcctgcctcatcctattatttatcgcacctacgttcaatattacaggcgaacatacttactaaagtgtgttaattaattaatgcttgtaggacataataataacaattgaatgtctgcacagccactttccacacagacatcataacaaaaaatttccaccaaaccccccctcccccgcttctggccacagcacttaaacacatctctgccaaaccccaaaaacaaagaaccctaacaccagcctaaccagatttcaaattttatcttttggcggtatgcacttttaacagtcaccccccaactaacacattattttcccctcccactcccatactactaatctcatcaatacaacccccgcccatcctacccagcacacacacaccgctgctaaccccataccccgaaccaaccaaaccccaaagacaccccccacagtttatgtagcttacctcctcaaagcaatacactgaaaatgtttagacgggctcacatcaccccataaacaaataggtttggtcctagcctttctattagctcttagtaagattacacatgcaagcatccccgttccagtgagttcaccctctaaatcaccacgatcaaaaggaacaagcatcaagcacgcagcaatgcagctcaaaacgcttagcctagccacacccccacgggaaacagcagtgattaacctttagcaataaacgaaagtttaactaagctatactaaccccagggttggtcaatttcgtgccagccaccgcggtcacacgattaacccaagtcaatagaagccggcgtaaagagtgttttagatcaccccctccccaataaagctaaaactcacctgagttgtaaaaaactccagttgacacaaaatagactacgaaagtggctttaacatatctgaacacacaatagctaagacccaaactgggattagataccccactatgcttagccctaaacctcaacagttaaatcaacaaaactgctcgccagaacactacgagccacagcttaaaactcaaaggacctggcggtgcttcatatccctctagaggagcctgttctgtaatcgataaaccccgatcaacctcaccacctcttgctcagcctatataccgccatcttcagcaaaccctgatgaaggctacaaagtaagcgcaagtacccacgtaaagacgttaggtcaaggtgtagcccatgaggtggcaagaaatgggctacattttctaccccagaaaactacgatagcccttatgaaacttaagggtcgaaggtggatttagcagtaaactaagagtagagtgcttagttgaacagggccctgaagcgcgtacacaccgcccgtcaccctcctcaagtatacttcaaaggacatttaactaaaacccctacgcatttatatagaggagacaagtcgtaacatggtaagtgtactggaaagtgcacttggacgaaccagagtgtagcttaacacaaagcacccaacttacacttaggagatttcaacttaacttgaccgctctgagctaaacctagccccaaacccactccaccttactaccagacaaccttagccaaaccatttacccaaataaagtataggcgatagaaattgaaacctggcgcaatagatatagtaccgcaagggaaagatgaaaaattataaccaagcataatatagcaaggactaacccctataccttctgcataatgaattaactagaaataactttgcaaggagagccaaagctaagacccccgaaaccagacgagctacctaagaacagctaaaagagcacacccgtctatgtagcaaaatagtgggaagatttataggtagaggcgacaaacctaccgagcctggtgatagctggttgtccaagatagaatcttagttcaactttaaatttgcccacagaaccctctaaatccccttgtaaatttaactgttagtccaaagaggaacagctctttggacactaggaaaaaaccttgtagagagagtaaaaaatttaacacccatagtaggcctaaaagcagccaccaattaagaaagcgttcaagctcaacacccactacctaaaaaatcccaaacatataactgaactcctcacacccaattggaccaatctatcaccctatagaagaactaatgttagtataagtaacatgaaaacattctcctccgcataagcctgcgtcagattaaaacactgaactgacaattaacagcccaatatctacaatcaaccaacaagtcattattaccctcactgtcaacccaacacaggcatgctcataaggaaaggttaaaaaaagtaaaaggaactcggcaaatcttaccccgcctgtttaccaaaaacatcacctctagcatcaccagtattagaggcaccgcctgcccagtgacacatgtttaacggccgcggtaccctaaccgtgcaaaggtagcataatcacttgttccttaaatagggacctgtatgaatggctccacgagggttcagctgtctcttacttttaaccagtgaaattgacctgcccgtgaagaggcgggcataacacagcaagacgagaagaccctatggagctttaatttattaatgcaaacagtacctaacaaacccacaggtcctaaactaccaaacctgcattaaaaatttcggttggggcgacctcggagcagaacccaacctccgagcagtacatgctaagacttcaccagtcaaagcgaactactatactcaattgatccaataacttgaccaacggaacaagttaccctagggataacagcgcaatcctattctagagtccatatcaacaatagggtttacgacctcgatgttggatcaggacatcccgatggtgcagccgctattaaaggttcgtttgttcaacgattaaagtcctacgtgatctgagttcagaccggagtaatccaggtcggtttctatctacttcaaattcctccctgtacgaaaggacaagagaaataaggcctacttcacaaagcgccttcccccgtaaatgatatcatctcaacttagtattatacccacacccacccaagaacagggtttgttaagatggcagagcccggtaatcgcataaaacttaaaactttacagtcagaggttcaattcctcttcttaacaacatacccatggccaacctcctactcctcattgtacccattctaatcgcaatggcattcctaatgcttaccgaacgaaaaattctaggctatatacaactacgcaaaggccccaacgttgtaggcccctacgggctactacaacccttcgctgacgccataaaactcttcaccaaagagcccctaaaacccgccacatctaccatcaccctctacatcaccgccccgaccttagctctcaccatcgctcttctactatgaacccccctccccatacccaaccccctggtcaacctcaacctaggcctcctatttattctagccacctctagcctagccgtttactcaatcctctgatcagggtgagcatcaaactcaaactacgccctgatcggcgcactgcgagcagtagcccaaacaatctcatatgaagtcaccctagccatcattctactatcaacattactaataagtggctcctttaacctctccacccttatcacaacacaagaacacctctgattactcctgccatcatgacccttggccataatatgatttatctccacactagcagagaccaaccgaacccccttcgaccttgccgaaggggagtccgaactagtctcaggcttcaacatcgaatacgccgcaggccccttcgccctattcttcatagccgaatacacaaacattattataataaacaccctcaccactacaatcttcctaggaacaacatatgacgcactctcccctgaactctacacaacatattttgtcaccaagaccctacttctaacctccctgttcttatgaattcgaacagcatacccccgattccgctacgaccaactcatacacctcctatgaaaaaacttcctaccactcaccctagcattacttatatgatatgtctccatacccattacaatctccagcattccccctcaaacctaagaaatatgtctgataaaagagttactttgatagagtaaataataggagcttaaacccccttatttctaggactatgagaatcgaacccatccctgagaatccaaaattctccgtgccacctatcacaccccatcctaaagtaaggtcagctaaataagctatcgggcccataccccgaaaatgttggttatacccttcccgtactaattaatcccctggcccaacccgtcatctactctaccatctttgcaggcacactcatcacagcgctaagctcgcactgattttttacctgagtaggcctagaaataaacatgctagcttttattccagttctaaccaaaaaaataaaccctcgttccacagaagctgccatcaagtatttcctcacgcaagcaaccgcatccataatccttctaatagctatcctcttcaacaatatactctccggacaatgaaccataaccaatactaccaatcaatactcatcattaataatcataatagctatagcaataaaactaggaatagccccctttcacttctgagtcccagaggttacccaaggcacccctctgacatccggcctgcttcttctcacatgacaaaaactagcccccatctcaatcatataccaaatctctccctcactaaacgtaagccttctcctcactctctcaatcttatccatcatagcaggcagttgaggtggattaaaccaaacccagctacgcaaaatcttagcatactcctcaattacccacataggatgaataatagcagttctaccgtacaaccctaacataaccattcttaatttaactatttatattatcctaactactaccgcattcctactactcaacttaaactccagcaccacgaccctactactatctcgcacctgaaacaagctaacatgactaacacccttaattccatccaccctcctctccctaggaggcctgcccccgctaaccggctttttgcccaaatgggccattatcgaagaattcacaaaaaacaatagcctcatcatccccaccatcatagccaccatcaccctccttaacctctacttctacctacgcctaatctactccacctcaatcacactactccccatatctaacaacgtaaaaataaaatgacagtttgaacatacaaaacccaccccattcctccccacactcatcgcccttaccacgctactcctacctatctccccttttatactaataatcttatagaaatttaggttaaatacagaccaagagccttcaaagccctcagtaagttgcaatacttaatttctgtaacagctaaggactgcaaaaccccactctgcatcaactgaacgcaaatcagccactttaattaagctaagcccttactagaccaatgggacttaaacccacaaacacttagttaacagctaagcaccctaatcaactggcttcaatctacttctcccgccgccgggaaaaaaggcgggagaagccccggcaggtttgaagctgcttcttcgaatttgcaattcaatatgaaaatcacctcggagctggtaaaaagaggcctaacccctgtctttagatttacagtccaatgcttcactcagccattttacctcacccccactgatgttcgccgaccgttgactattctctacaaaccacaaagacattggaacactatacctattattcggcgcatgagctggagtcctaggcacagctctaagcctccttattcgagccgagctgggccagccaggcaaccttctaggtaacgaccacatctacaacgttatcgtcacagcccatgcatttgtaataatcttcttcatagtaatacccatcataatcggaggctttggcaactgactagttcccctaataatcggtgcccccgatatggcgtttccccgcataaacaacataagcttctgactcttacctccctctctcctactcctgctcgcatctgctatagtggaggccggagcaggaacaggttgaacagtctaccctcccttagcagggaactactcccaccctggagcctccgtagacctaaccatcttctccttacacctagcaggtgtctcctctatcttaggggccatcaatttcatcacaacaattatcaatataaaaccccctgccataacccaataccaaacgcccctcttcgtctgatccgtcctaatcacagcagtcctacttctcctatctctcccagtcctagctgctggcatcactatactactaacagaccgcaacctcaacaccaccttcttcgaccccgccggaggaggagaccccattctataccaacacctattctgatttttcggtcaccctgaagtttatattcttatcctaccaggcttcggaataatctcccatattgtaacttactactccggaaaaaaagaaccatttggatacataggtatggtctgagctatgatatcaattggcttcctagggtttatcgtgtgagcacaccatatatttacagtaggaatagacgtagacacacgagcatatttcacctccgctaccataatcatcgctatccccaccggcgtcaaagtatttagctgactcgccacactccacggaagcaatatgaaatgatctgctgcagtgtctctgagccctaggattcatctttcttttcaccgtaggtggcctgactggcattgtattagcaaactcatcactagacatcgtactacacgacacgtactacgttgtagcccacttccactatgtcctatcaataggagctgtatttgccatcataggaggcttcattcactgatttcccctattctcaggctacaccctagaccaaacctacgccaaaatccatttcactatcatattcatcggcgtaaatctaactttcttcccacaacactttctcggcctatccggaatgccccgacgttactcggactaccccgatgcatacaccacatgaaacatcctatcatctgtaggctcattcatttctctaacagcagtaatattaataattttcatgatttgagaagccttcgcttcgaagcgaaaagtcctaatagtagaagaaccctccataaacctggagtgactatatggatgccccccaccctaccacacattcgaagaacccgtatacataaaatctagacaaaaaaggaaggaatcgaaccccccaaagctggtttcaagccaaccccatggcctccatgactttttcaaaaaggtattagaaaaaccatttcataactttgtcaaagttaaattataggctaaatcctatatatcttaatggcacatgcagcgcaagtaggtctacaagacgctacttcccctatcatagaagagcttatcacctttcatgatcacgccctcataatcattttccttatctgcttcctagtcctgtatgcccttttcctaacactcacaacaaaactaactaatactaacatctcagacgctcaggaaatagaaaccgtctgaactatcctgcccgccatcatcctagtcctcatcgccctcccatccctacgcatcctttacataacagacgaggtcaacgatccctcccttaccatcaaatcaattggccaccaatggtactgaacctacgagtacaccgactacggcggactaatcttcaactcctacatacttcccccattattcctagaaccaggcgacctgcgactccttgacgttgacaatcgagtagtactcccgattgaagcccccattcgtataataattacatcacaagacgtcttgcactcatgagctgtccccacattaggcttaaaaacagatgcaattcccggacgtctaaaccaaaccactttcaccgctacacgaccgggggtatactacggtcaatgctctgaaatctgtggagcaaaccacagtttcatgcccatcgtcctagaattaattcccctaaaaatctttgaaatagggcccgtatttaccctatagcaccccctctaccccctctagagcccactgtaaagctaacttagcattaaccttttaagttaaagattaagagaaccaacacctctttacagtgaaatgccccaactaaatactaccgtatggcccaccataattacccccatactccttacactattcctcatcacccaactaaaaatattaaacacaaactaccacctacctccctcaccaaagcccataaaaataaaaaattataacaaaccctgagaaccaaaatgaacgaaaatctgttcgcttcattcattgcccccacaatcctaggcctacccgccgcagtactgatcattctatttccccctctattgatccccacctccaaatatctcatcaacaaccgactaatcaccacccaacaatgactaatcaaactaacctcaaaacaaatgataaccatacacaacactaaaggacgaacctgatctcttatactagtatccttaatcatttttattgccacaactaacctcctcggactcctgcctcactcatttacaccaaccacccaactatctataaacctagccatggccatccccttatgagcgggcacagtgattataggctttcgctctaagattaaaaatgccctagcccacttcttaccacaaggcacacctacaccccttatccccatactagttattatcgaaaccatcagcctactcattcaaccaatagccctggccgtacgcctaaccgctaacattactgcaggccacctactcatgcacctaattggaagcgccaccctagcaatatcaaccattaaccttccctctacacttatcatcttcacaattctaattctactgactatcctagaaatcgctgtcgccttaatccaagcctacgttttcacacttctagtaagcctctacctgcacgacaacacataatgacccaccaatcacatgcctatcatatagtaaaacccagcccatgacccctaacaggggccctctcagccctcctaatgacctccggcctagccatgtgatttcacttccactccataacgctcctcatactaggcctactaaccaacacactaaccatataccaatgatggcgcgatgtaacacgagaaagcacataccaaggccaccacacaccacctgtccaaaaaggccttcgatacgggataatcctatttattacctcagaagtttttttcttcgcaggatttttctgagccttttaccactccagcctagcccctaccccccaattaggagggcactggcccccaacaggcatcaccccgctaaatcccctagaagtcccactcctaaacacatccgtattactcgcatcaggagtatcaatcacctgagctcaccatagtctaatagaaaacaaccgaaaccaaataattcaagcactgcttattacaattttactgggtctctattttaccctcctacaagcctcagagtacttcgagtctcccttcaccatttccgacggcatctacggctcaacattttttgtagccacaggcttccacggacttcacgtcattattggctcaactttcctcactatctgcttcatccgccaactaatatttcactttacatccaaacatcactttggcttcgaagccgccgcctgatactggcattttgtagatgtggtttgactatttctgtatgtctccatctattgatgagggtcttactcttttagtataaatagtaccgttaacttccaattaactagttttgacaacattcaaaaaagagtaataaacttcgccttaattttaataatcaacaccctcctagccttactactaataattattacattttgactaccacaactcaacggctacatagaaaaatccaccccttacgagtgcggcttcgaccctatatcccccgcccgcgtccctttctccataaaattcttcttagtagctattaccttcttattatttgatctagaaattgccctccttttacccctaccatgagccctacaaacaactaacctgccactaatagttatgtcatccctcttattaatcatcatcctagccctaagtctggcctatgagtgactacaaaaaggattagactgaaccgaattggtatatagtttaaacaaaacgaatgatttcgactcattaaattatgataatcatatttaccaaatgcccctcatttacataaatattatactagcatttaccatctcacttctaggaatactagtatatcgctcacacctcatatcctccctactatgcctagaaggaataatactatcgctgttcattatagctactctcataaccctcaacacccactccctcttagccaatattgtgcctattgccatactagtctttgccgcctgcgaagcagcggtgggcctagccctactagtctcaatctccaacacatatggcctagactacgtacataacctaaacctactccaatgctaaaactaatcgtcccaacaattatattactaccactgacatgactttccaaaaaacacataatttgaatcaacacaaccacccacagcctaattattagcatcatccctctactattttttaaccaaatcaacaacaacctatttagctgttccccaaccttttcctccgaccccctaacaacccccctcctaatactaactacctgactcctacccctcacaatcatggcaagccaacgccacttatccagtgaaccactatcacgaaaaaaactctacctctctatactaatctccctacaaatctccttaattataacattcacagccacagaactaatcatattttatatcttcttcgaaaccacacttatccccaccttggctatcatcacccgatgaggcaaccagccagaacgcctgaacgcaggcacatacttcctattctacaccctagtaggctcccttcccctactcatcgcactaatttacactcacaacaccctaggctcactaaacattctactactcactctcactgcccaagaactatcaaactcctgagccaacaacttaatatgactagcttacacaatagcttttatagtaaagatacctctttacggactccacttatgactccctaaagcccatgtcgaagcccccatcgctgggtcaatagtacttgccgcagtactcttaaaactaggcggctatggtataatacgcctcacactcattctcaaccccctgacaaaacacatagcctaccccttccttgtactatccctatgaggcataattataacaagctccatctgcctacgacaaacagacctaaaatcgctcattgcatactcttcaatcagccacatagccctcgtagtaacagccattctcatccaaaccccctgaagcttcaccggcgcagtcattctcataatcgcccacgggcttacatcctcattactattctgcctagcaaactcaaactacgaacgcactcacagtcgcatcataatcctctctcaaggacttcaaactctactcccactaatagctttttgatgacttctagcaagcctcgctaacctcgccttaccccccactattaacctactgggagaactctctgtgctagtaaccacgttctcctgatcaaatatcactctcctacttacaggactcaacatactagtcacagccctatactccctctacatatttaccacaacacaatggggctcactcacccaccacattaacaacataaaaccctcattcacacgagaaaacaccctcatgttcatacacctatcccccattctcctcctatccctcaaccccgacatcattaccgggttttcctcttgtaaatatagtttaaccaaaacatcagattgtgaatctgacaacagaggcttacgaccccttatttaccgagaaagctcacaagaactgctaactcatgcccccatgtctaacaacatggctttctcaacttttaaaggataacagctatccattggtcttaggccccaaaaattttggtgcaactccaaataaaagtaataaccatgcacactactataaccaccctaaccctgacttccctaattccccccatccttaccaccctcgttaaccctaacaaaaaaaactcatacccccattatgtaaaatccattgtcgcatccacctttattatcagtctcttccccacaacaatattcatgtgcctagaccaagaagttattatctcgaactgacactgagccacaacccaaacaacccagctctccctaagcttcaaactagactacttctccataatattcatccctgtagcattgttcgttacatggtccatcatagaattctcactgtgatatataaactcagacccaaacattaatcagttcttcaaatatctactcatcttcctaattaccatactaatcttagttaccgctaacaacctattccaactgttcatcggctgagagggcgtaggaattatatccttcttgctcatcagttgatgatacgcccgagcagatgccaacacagcagccattcaagcaatcctatacaaccgtatcggcgatatcggtttcatcctcgccttagcatgatttatcctacactccaactcatgagacccacaacaaatagcccttctaaacgctaatccaagcctcaccccactactaggcctcctcctagcagcagcaggcaaatcagcccaattaggtctccacccctgactcccctcagccatagaaggccccaccccagtctcagccctactccactcaagcactatagttgtagcaggaatcttcttactcatccgcttccaccccctagcagaaaatagcccactaatccaaactctaacactatgcttaggcgctatcaccactctgttcgcagcagtctgcgcccttacacaaaatgacatcaaaaaaatcgtagccttctccacttcaagtcaactaggactcataatagttacaatcggcatcaaccaaccacacctagcattcctgcacatctgtacccacgccttcttcaaagccatactatttatgtgctccgggtccatcatccacaaccttaacaatgaacaagatattcgaaaaataggaggactactcaaaaccatacctctcacttcaacctccctcaccattggcagcctagcattagcaggaatacctttcctcacaggtttctactccaaagaccacatcatcgaaaccgcaaacatatcatacacaaacgcctgagccctatctattactctcatcgctacctccctgacaagcgcctatagcactcgaataattcttctcaccctaacaggtcaacctcgcttccccacccttactaacattaacgaaaataaccccaccctactaaaccccattaaacgcctggcagccggaagcctattcgcaggatttctcattactaacaacatttcccccgcatcccccttccaaacaacaatccccctctacctaaaactcacagccctcgctgtcactttcctaggacttctaacagccctagacctcaactacctaaccaacaaacttaaaataaaatccccactatgcacattttatttctccaacatactcggattctaccctagcatcacacaccgcacaatcccctatctaggccttcttacgagccaaaacctgcccctactcctcctagacctaacctgactagaaaagctattacctaaaacaatttcacagcaccaaatctccacctccatcatcacctcaacccaaaaaggcataattaaactttacttcctctctttcttcttcccactcatcctaaccctactcctaatcacataacctattcccccgagcaatctcaattacaatatatacaccaacaaacaatgttcaaccagtaactactactaatcaacgcccataatcatacaaagcccccgcaccaataggatcctcccgaatcaaccctgacccctctccttcataaattattcagcttcctacactattaaagtttaccacaaccaccaccccatcatactctttcacccacagcaccaatcctacctccatcgctaaccccactaaaacactcaccaagacctcaacccctgacccccatgcctcaggatactcctcaatagccatcgctgtagtatatccaaagacaaccatcattccccctaaataaattaaaaaaactattaaacccatataacctcccccaaaattcagaataataacacacccgaccacaccgctaacaatcaatactaaacccccataaataggagaaggcttagaagaaaaccccacaaaccccattactaaacccacactcaacagaaacaaagcatacatcattattctcgcacggactacaaccacgaccaatgatatgaaaaaccatcgttgtatttcaactacaagaacaccaatgaccccaatacgcaaaactaaccccctaataaaattaattaaccactcattcatcgacctccccaccccatccaacatctccgcatgatgaaacttcggctcactccttggcgcctgcctgatcctccaaatcaccacaggactattcctagccatgcactactcaccagacgcctcaaccgccttttcatcaatcgcccacatcactcgagacgtaaattatggctgaatcatccgctaccttcacgccaatggcgcctcaatattctttatctgcctcttcctacacatcgggcgaggcctatattacggatcatttctctactcagaaacctgaaacatcggcattatcctcctgcttgcaactatagcaacagccttcataggctatgtcctcccgtgaggccaaatatcattctgaggggccacagtaattacaaacttactatccgccatcccatacattgggacagacctagttcaatgaatctgaggaggctactcagtagacagtcccaccctcacacgattctttacctttcacttcatcttgcccttcattattgcagccctagcaacactccacctcctattcttgcacgaaacgggatcaaacaaccccctaggaatcacctcccattccgataaaatcaccttccacccttactacacaatcaaagacgccctcggcttacttctcttccttctctccttaatgacattaacactattctcaccagacctcctaggcgacccagacaattataccctagccaaccccttaaacacccctccccacatcaagcccgaatgatatttcctattcgcctacacaattctccgatccgtccctaacaaactaggaggcgtccttgccctattactatccatcctcatcctagcaataatccccatcctccatatatccaaacaacaaagcataatatttcgcccactaagccaatcactttattgactcctagccgcagacctcctcattctaacctgaatcggaggacaaccagtaagctacccttttaccatcattggacaagtagcatccgtactatacttcacaacaatcctaatcctaataccaactatctccctaattgaaaacaaaatactcaaatgggcctgtccttgtagtataaactaatacaccagtcttgtaaaccggagatgaaaacctttttccaaggacaaatcagagaaaaagtctttaactccaccattagcacccaaagctaagattctaatttaaactattctctgttctttcatggggaagcagatttgggtaccacccaagtattgactcacccatcaacaaccgctatgtatttcgtacattactgccagccaccatgaatattgtacggtaccataaatacttgaccacctgtagtacataaaaacccaatccacatcaaaaccccctccccatgcttacaagcaagtacagcaatcaaccctcaactatcacacatcaactgcaactccaaagccacccctcacccactaggataccaacaaacctacccacccttaacagtacatagtacataaagccatttaccgtacatagcacattacagtcaaatcccttctcgtccccatggatgacccccctcagataggggtcccttgaccaccatcctccgtgaaatcaatatcccgcacaagagtgctactctcctcgctccgggcccataacacttgggggtagctaaagtgaactgtatccgacatctggttcctacttcagggtcataaagcctaaatagcccacacgttccccttaaataagacatcacgatg

SEQ ID NO: 134 - DNA, 16569 bp, Homo sapiens mitochondrial DNA
  insertion (7406)..(7407): 7406.1INS C
gatcacaggtctatcaccctattaaccactcacgggagctctccatgcatttggtattttcgtctggggggtatgcacgcgatagcattgcgagacgctggagccggagcaccctatgtcgcagtatctgtctttgattcctgcctcatcctattatttatcgcacctacgttcaatattacaggcgaacatacttactaaagtgtgttaattaattaatgcttgtaggacataataataacaattgaatgtctgcacagccactttccacacagacatcataacaaaaaatttccaccaaaccccccctcccccgcttctggccacagcacttaaacacatctctgccaaaccccaaaaacaaagaaccctaacaccagcctaaccagatttcaaattttatcttttggcggtatgcacttttaacagtcaccccccaactaacacattattttcccctcccactcccatactactaatctcatcaatacaacccccgcccatcctacccagcacacacacaccgctgctaaccccataccccgaaccaaccaaaccccaaagacaccccccacagtttatgtagcttacctcctcaaagcaatacactgaaaatgtttagacgggctcacatcaccccataaacaaataggtttggtcctagcctttctattagctcttagtaagattacacatgcaagcatccccgttccagtgagttcaccctctaaatcaccacgatcaaaaggaacaagcatcaagcacgcagcaatgcagctcaaaacgcttagcctagccacacccccacgggaaacagcagtgattaacctttagcaataaacgaaagtttaactaagctatactaaccccagggttggtcaatttcgtgccagccaccgcggtcacacgattaacccaagtcaatagaagccggcgtaaagagtgttttagatcaccccctccccaataaagctaaaactcacctgagttgtaaaaaactccagttgacacaaaatagactacgaaagtggctttaacatatctgaacacacaatagctaagacccaaactgggattagataccccactatgcttagccctaaacctcaacagttaaatcaacaaaactgctcgccagaacactacgagccacagcttaaaactcaaaggacctggcggtgcttcatatccctctagaggagcctgttctgtaatcgataaaccccgatcaacctcaccacctcttgctcagcctatataccgccatcttcagcaaaccctgatgaaggctacaaagtaagcgcaagtacccacgtaaagacgttaggtcaaggtgtagcccatgaggtggcaagaaatgggctacattttctaccccagaaaactacgatagcccttatgaaacttaagggtcgaaggtggatttagcagtaaactaagagtagagtgcttagttgaacagggccctgaagcgcgtacacaccgcccgtcaccctcctcaagtatacttcaaaggacatttaactaaaacccctacgcatttatatagaggagacaagtcgtaacatggtaagtgtactggaaagtgcacttggacgaaccagagtgtagcttaacacaaagcacccaacttacacttaggagatttcaacttaacttgaccgctctgagctaaacctagccccaaacccactccaccttactaccagacaaccttagccaaaccatttacccaaataaagtataggcgatagaaattgaaacctggcgcaatagatatagtaccgcaagggaaagatgaaaaattataaccaagcataatatagcaaggactaacccctataccttctgcataatgaattaactagaaataactttgcaaggagagccaaagctaagacccccgaaaccagacgagctacctaagaacagctaaaagagcacacccgtctatgtagcaaaatagtgggaagatttataggtagaggcgacaaacctaccgagcctggtgatagctggttgtccaagatagaatcttagttcaactttaaatttgcccacagaaccctctaaatccccttgtaaatttaactgttagtccaaagaggaacagctctttggacactaggaaaaaaccttgtagagagagtaaaaaatttaacacccatagtaggcctaaaagcagccaccaattaagaaagcgttcaagctcaacacccactacctaaaaaatcccaaacatataactgaactcctcacacccaattggaccaatctatcaccctatagaagaactaatgttagtataagtaacatgaaaacattctcctccgcataagcctgcgtcagattaaaacactgaactgacaattaacagcccaatatctacaatcaaccaacaagtcattattaccctcactgtcaacccaacacaggcatgctcataaggaaaggttaaaaaaagtaaaaggaactcggcaaatcttaccccgcctgtttaccaaaaacatcacctctagcatcaccagtattagaggcaccgcctgcccagtgacacatgtttaacggccgcggtaccctaaccgtgcaaaggtagcataatcacttgttccttaaatagggacctgtatgaatggctccacgagggttcagctgtctcttacttttaaccagtgaaattgacctgcccgtgaagaggcgggcataacacagcaagacgagaagaccctatggagctttaatttattaatgcaaacagtacctaacaaacccacaggtcctaaactaccaaacctgcattaaaaatttcggttggggcgacctcggagcagaacccaacctccgagcagtacatgctaagacttcaccagtcaaagcgaactactatactcaattgatccaataacttgaccaacggaacaagttaccctagggataacagcgcaatcctattctagagtccatatcaacaatagggtttacgacctcgatgttggatcaggacatcccgatggtgcagccgctattaaaggttcgtttgttcaacgattaaagtcctacgtgatctgagttcagaccggagtaatccaggtcggtttctatctacttcaaattcctccctgtacgaaaggacaagagaaataaggcctacttcacaaagcgccttcccccgtaaatgatatcatctcaacttagtattatacccacacccacccaagaacagggtttgttaagatggcagagcccggtaatcgcataaaacttaaaactttacagtcagaggttcaattcctcttcttaacaacatacccatggccaacctcctactcctcattgtacccattctaatcgcaatggcattcctaatgcttaccgaacgaaaaattctaggctatatacaactacgcaaaggccccaacgttgtaggcccctacgggctactacaacccttcgctgacgccataaaactcttcaccaaagagcccctaaaacccgccacatctaccatcaccctctacatcaccgccccgaccttagctctcaccatcgctcttctactatgaacccccctccccatacccaaccccctggtcaacctcaacctaggcctcctatttattctagccacctctagcctagccgtttactcaatcctctgatcagggtgagcatcaaactcaaactacgccctgatcggcgcactgcgagcagtagcccaaacaatctcatatgaagtcaccctagccatcattctactatcaacattactaataagtggctcctttaacctctccacccttatcacaacacaagaacacctctgattactcctgccatcatgacccttggccataatatgatttatctccacactagcagagaccaaccgaacccccttcgaccttgccgaaggggagtccgaactagtctcaggcttcaacatcgaatacgccgcaggccccttcgccctattcttcatagccgaatacacaaacattattataataaacaccctcaccactacaatcttcctaggaacaacatatgacgcactctcccctgaactctacacaacatattttgtcaccaagaccctacttctaacctccctgttcttatgaattcgaacagcatacccccgattccgctacgaccaactcatacacctcctatgaaaaaacttcctaccactcaccctagcattacttatatgatatgtctccatacccattacaatctccagcattccccctcaaacctaagaaatatgtctgataaaagagttactttgatagagtaaataataggagcttaaacccccttatttctaggactatgagaatcgaacccatccctgagaatccaaaattctccgtgccacctatcacaccccatcctaaagtaaggtcagctaaataagctatcgggcccataccccgaaaatgttggttatacccttcccgtactaattaatcccctggcccaacccgtcatctactctaccatctttgcaggcacactcatcacagcgctaagctcgcactgattttttacctgagtaggcctagaaataaacatgctagcttttattccagttctaaccaaaaaaataaaccctcgttccacagaagctgccatcaagtatttcctcacgcaagcaaccgcatccataatccttctaatagctatcctcttcaacaatatactctccggacaatgaaccataaccaatactaccaatcaatactcatcattaataatcataatagctatagcaataaaactaggaatagccccctttcacttctgagtcccagaggttacccaaggcacccctctgacatccggcctgcttcttctcacatgacaaaaactagcccccatctcaatcatataccaaatctctccctcactaaacgtaagccttctcctcactctctcaatcttatccatcatagcaggcagttgaggtggattaaaccaaacccagctacgcaaaatcttagcatactcctcaattacccacataggatgaataatagcagttctaccgtacaaccctaacataaccattcttaatttaactatttatattatcctaactactaccgcattcctactactcaacttaaactccagcaccacgaccctactactatctcgcacctgaaacaagctaacatgactaacacccttaattccatccaccctcctctccctaggaggcctgcccccgctaaccggctttttgcccaaatgggccattatcgaagaattcacaaaaaacaatagcctcatcatccccaccatcatagccaccatcaccctccttaacctctacttctacctacgcctaatctactccacctcaatcacactactccccatatctaacaacgtaaaaataaaatgacagtttgaacatacaaaacccaccccattcctccccacactcatcgcccttaccacgctactcctacctatctccccttttatactaataatcttatagaaatttaggttaaatacagaccaagagccttcaaagccctcagtaagttgcaatacttaatttctgtaacagctaaggactgcaaaaccccactctgcatcaactgaacgcaaatcagccactttaattaagctaagcccttactagaccaatgggacttaaacccacaaacacttagttaacagctaagcaccctaatcaactggcttcaatctacttctcccgccgccgggaaaaaaggcgggagaagccccggcaggtttgaagctgcttcttcgaatttgcaattcaatatgaaaatcacctcggagctggtaaaaagaggcctaacccctgtctttagatttacagtccaatgcttcactcagccattttacctcacccccactgatgttcgccgaccgttgactattctctacaaaccacaaagacattggaacactatacctattattcggcgcatgagctggagtcctaggcacagctctaagcctccttattcgagccgagctgggccagccaggcaaccttctaggtaacgaccacatctacaacgttatcgtcacagcccatgcatttgtaataatcttcttcatagtaatacccatcataatcggaggctttggcaactgactagttcccctaataatcggtgcccccgatatggcgtttccccgcataaacaacataagcttctgactcttacctccctctctcctactcctgctcgcatctgctatagtggaggccggagcaggaacaggttgaacagtctaccctcccttagcagggaactactcccaccctggagcctccgtagacctaaccatcttctccttacacctagcaggtgtctcctctatcttaggggccatcaatttcatcacaacaattatcaatataaaaccccctgccataacccaataccaaacgcccctcttcgtctgatccgtcctaatcacagcagtcctacttctcctatctctcccagtcctagctgctggcatcactatactactaacagaccgcaacctcaacaccaccttcttcgaccccgccggaggaggagaccccattctataccaacacctattctgatttttcggtcaccctgaagtttatattcttatcctaccaggcttcggaataatctcccatattgtaacttactactccggaaaaaaagaaccatttggatacataggtatggtctgagctatgatatcaattggcttcctagggtttatcgtgtgagcacaccatatatttacagtaggaatagacgtagacacacgagcatatttcacctccgctaccataatcatcgctatccccaccggcgtcaaagtatttagctgactcgccacactccacggaagcaatatgaaatgatctgctgcagtgctctgagccctaggattcatctttcttttcaccgtaggtggcctgactggcattgtattagcaaactcatcactagacatcgtactacacgacacgtactacgttgtagcccacttccactatgtcctatcaataggagctgtatttgccatcataggaggcttcattcactgatttcccctattctcaggctacaccctagaccaaacctacgccaaaatccatttcactatcatattcatcggcgtaaatctaactttcttcccacaacactttctcggcctatccggaatgccccgacgttactcggactaccccgatgcatacaccacatgaaacatcctatcatctgtaggctcattcatttctctaacagcagtaatattaataattttcatgatttgagaagccttcgcttcgaagcgaaaagtcctaatagtagaagaaccctccataaacctggagtgactatatggatgccccccacccctaccacacattcgaagaacccgtatacataaaatctagacaaaaaaggaaggaatcgaaccccccaaagctggtttcaagccaaccccatggcctccatgactttttcaaaaaggtattagaaaaaccatttcataactttgtcaaagttaaattataggctaaatcctatatatcttaatggcacatgcagcgcaagtaggtctacaagacgctacttcccctatcatagaagagcttatcacctttcatgatcacgccctcataatcattttccttatctgcttcctagtcctgtatgcccttttcctaacactcacaacaaaactaactaatactaacatctcagacgctcaggaaatagaaaccgtctgaactatcctgcccgccatcatcctagtcctcatcgccctcccatccctacgcatcctttacataacagacgaggtcaacgatccctcccttaccatcaaatcaattggccaccaatggtactgaacctacgagtacaccgactacggcggactaatcttcaactcctacatacttcccccattattcctagaaccaggcgacctgcgactccttgacgttgacaatcgagtagtactcccgattgaagcccccattcgtataataattacatcacaagacgtcttgcactcatgagctgtccccacattaggcttaaaaacagatgcaattcccggacgtctaaaccaaaccactttcaccgctacacgaccgggggtatactacggtcaatgctctgaaatctgtggagcaaaccacagtttcatgcccatcgtcctagaattaattcccctaaaaatctttgaaatagggcccgtatttaccctatagcaccccctctaccccctctagagcccactgtaaagctaacttagcattaaccttttaagttaaagattaagagaaccaacacctctttacagtgaaatgccccaactaaatactaccgtatggcccaccataattacccccatactccttacactattcctcatcacccaactaaaaatattaaacacaaactaccacctacctccctcaccaaagcccataaaaataaaaaattataacaaaccctgagaaccaaaatgaacgaaaatctgttcgcttcattcattgcccccacaatcctaggcctacccgccgcagtactgatcattctatttccccctctattgatccccacctccaaatatctcatcaacaaccgactaatcaccacccaacaatgactaatcaaactaacctcaaaacaaatgataaccatacacaacactaaaggacgaacctgatctcttatactagtatccttaatcatttttattgccacaactaacctcctcggactcctgcctcactcatttacaccaaccacccaactatctataaacctagccatggccatccccttatgagcgggcacagtgattataggctttcgctctaagattaaaaatgccctagcccacttcttaccacaaggcacacctacaccccttatccccatactagttattatcgaaaccatcagcctactcattcaaccaatagccctggccgtacgcctaaccgctaacattactgcaggccacctactcatgcacctaattggaagcgccaccctagcaatatcaaccattaaccttccctctacacttatcatcttcacaattctaattctactgactatcctagaaatcgctgtcgccttaatccaagcctacgttttcacacttctagtaagcctctacctgcacgacaacacataatgacccaccaatcacatgcctatcatatagtaaaacccagcccatgacccctaacaggggccctctcagccctcctaatgacctccggcctagccatgtgatttcacttccactccataacgctcctcatactaggcctactaaccaacacactaaccatataccaatgatggcgcgatgtaacacgagaaagcacataccaaggccaccacacaccacctgtccaaaaaggccttcgatacgggataatcctatttattacctcagaagtttttttcttcgcaggatttttctgagccttttaccactccagcctagcccctaccccccaattaggagggcactggcccccaacaggcatcaccccgctaaatcccctagaagtcccactcctaaacacatccgtattactcgcatcaggagtatcaatcacctgagctcaccatagtctaatagaaaacaaccgaaaccaaataattcaagcactgcttattacaattttactgggtctctattttaccctcctacaagcctcagagtacttcgagtctcccttcaccatttccgacggcatctacggctcaacattttttgtagccacaggcttccacggacttcacgtcattattggctcaactttcctcactatctgcttcatccgccaactaatatttcactttacatccaaacatcactttggcttcgaagccgccgcctgatactggcattttgtagatgtggtttgactatttctgtatgtctccatctattgatgagggtcttactcttttagtataaatagtaccgttaacttccaattaactagttttgacaacattcaaaaaagagtaataaacttcgccttaattttaataatcaacaccctcctagccttactactaataattattacattttgactaccacaactcaacggctacatagaaaaatccaccccttacgagtgcggcttcgaccctatatcccccgcccgcgtccctttctccataaaattcttcttagtagctattaccttcttattatttgatctagaaattgccctccttttacccctaccatgagccctacaaacaactaacctgccactaatagttatgtcatccctcttattaatcatcatcctagccctaagtctggcctatgagtgactacaaaaaggattagactgaaccgaattggtatatagtttaaacaaaacgaatgatttcgactcattaaattatgataatcatatttaccaaatgcccctcatttacataaatattatactagcatttaccatctcacttctaggaatactagtatatcgctcacacctcatatcctccctactatgcctagaaggaataatactatcgctgttcattatagctactctcataaccctcaacacccactccctcttagccaatattgtgcctattgccatactagtctttgccgcctgcgaagcagcggtgggcctagccctactagtctcaatctccaacacatatggcctagactacgtacataacctaaacctactccaatgctaaaactaatcgtcccaacaattatattactaccactgacatgactttccaaaaaacacataatttgaatcaacacaaccacccacagcctaattattagcatcatccctctactattttttaaccaaatcaacaacaacctatttagctgttccccaaccttttcctccgaccccctaacaacccccctcctaatactaactacctgactcctacccctcacaatcatggcaagccaacgccacttatccagtgaaccactatcacgaaaaaaactctacctctctatactaatctccctacaaatctccttaattataacattcacagccacagaactaatcatattttatatcttcttcgaaaccacacttatccccaccttggctatcatcacccgatgaggcaaccagccagaacgcctgaacgcaggcacatacttcctattctacaccctagtaggctcccttcccctactcatcgcactaatttacactcacaacaccctaggctcactaaacattctactactcactctcactgcccaagaactatcaaactcctgagccaacaacttaatatgactagcttacacaatagcttttatagtaaagatacctctttacggactccacttatgactccctaaagcccatgtcgaagcccccatcgctgggtcaatagtacttgccgcagtactcttaaaactaggcggctatggtataatacgcctcacactcattctcaaccccctgacaaaacacatagcctaccccttccttgtactatccctatgaggcataattataacaagctccatctgcctacgacaaacagacctaaaatcgctcattgcatactcttcaatcagccacatagccctcgtagtaacagccattctcatccaaaccccctgaagcttcaccggcgcagtcattctcataatcgcccacgggcttacatcctcattactattctgcctagcaaactcaaactacgaacgcactcacagtcgcatcataatcctctctcaaggacttcaaactctactcccactaatagctttttgatgacttctagcaagcctcgctaacctcgccttaccccccactattaacctactgggagaactctctgtgctagtaaccacgttctcctgatcaaatatcactctcctacttacaggactcaacatactagtcacagccctatactccctctacatatttaccacaacacaatggggctcactcacccaccacattaacaacataaaaccctcattcacacgagaaaacaccctcatgttcatacacctatcccccattctcctcctatccctcaaccccgacatcattaccgggttttcctcttgtaaatatagtttaaccaaaacatcagattgtgaatctgacaacagaggcttacgaccccttatttaccgagaaagctcacaagaactgctaactcatgcccccatgtctaacaacatggctttctcaacttttaaaggataacagctatccattggtcttaggccccaaaaattttggtgcaactccaaataaaagtaataaccatgcacactactataaccaccctaaccctgacttccctaattccccccatccttaccaccctcgttaaccctaacaaaaaaaactcatacccccattatgtaaaatccattgtcgcatccacctttattatcagtctcttccccacaacaatattcatgtgcctagaccaagaagttattatctcgaactgacactgagccacaacccaaacaacccagctctccctaagcttcaaactagactacttctccataatattcatccctgtagcattgttcgttacatggtccatcatagaattctcactgtgatatataaactcagacccaaacattaatcagttcttcaaatatctactcatcttcctaattaccatactaatcttagttaccgctaacaacctattccaactgttcatcggctgagagggcgtaggaattatatccttcttgctcatcagttgatgatacgcccgagcagatgccaacacagcagccattcaagcaatcctatacaaccgtatcggcgatatcggtttcatcctcgccttagcatgatttatcctacactccaactcatgagacccacaacaaatagcccttctaaacgctaatccaagcctcaccccactactaggcctcctcctagcagcagcaggcaaatcagcccaattaggtctccacccctgactcccctcagccatagaaggccccaccccagtctcagccctactccactcaagcactatagttgtagcaggaatcttcttactcatccgcttccaccccctagcagaaaatagcccactaatccaaactctaacactatgcttaggcgctatcaccactctgttcgcagcagtctgcgcccttacacaaaatgacatcaaaaaaatcgtagccttctccacttcaagtcaactaggactcataatagttacaatcggcatcaaccaaccacacctagcattcctgcacatctgtacccacgccttcttcaaagccatactatttatgtgctccgggtccatcatccacaaccttaacaatgaacaagatattcgaaaaataggaggactactcaaaaccatacctctcacttcaacctccctcaccattggcagcctagcattagcaggaatacctttcctcacaggtttctactccaaagaccacatcatcgaaaccgcaaacatatcatacacaaacgcctgagccctatctattactctcatcgctacctccctgacaagcgcctatagcactcgaataattcttctcaccctaacaggtcaacctcgcttccccacccttactaacattaacgaaaataaccccaccctactaaaccccattaaacgcctggcagccggaagcctattcgcaggatttctcattactaacaacatttcccccgcatcccccttccaaacaacaatccccctctacctaaaactcacagccctcgctgtcactttcctaggacttctaacagccctagacctcaactacctaaccaacaaacttaaaataaaatccccactatgcacattttatttctccaacatactcggattctaccctagcatcacacaccgcacaatcccctatctaggccttcttacgagccaaaacctgcccctactcctcctagacctaacctgactagaaaagctattacctaaaacaatttcacagcaccaaatctccacctccatcatcacctcaacccaaaaaggcataattaaactttacttcctctctttcttcttcccactcatcctaaccctactcctaatcacataacctattcccccgagcaatctcaattacaatatatacaccaacaaacaatgttcaaccagtaactactactaatcaacgcccataatcatacaaagcccccgcaccaataggatcctcccgaatcaaccctgacccctctccttcataaattattcagcttcctacactattaaagtttaccacaaccaccaccccatcatactctttcacccacagcaccaatcctacctccatcgctaaccccactaaaacactcaccaagacctcaacccctgacccccatgcctcaggatactcctcaatagccatcgctgtagtatatccaaagacaaccatcattccccctaaataaattaaaaaaactattaaacccatataacctcccccaaaattcagaataataacacacccgaccacaccgctaacaatcaatactaaacccccataaataggagaaggcttagaagaaaaccccacaaaccccattactaaacccacactcaacagaaacaaagcatacatcattattctcgcacggactacaaccacgaccaatgatatgaaaaaccatcgttgtatttcaactacaagaacaccaatgaccccaatacgcaaaactaaccccctaataaaattaattaaccactcattcatcgacctccccaccccatccaacatctccgcatgatgaaacttcggctcactccttggcgcctgcctgatcctccaaatcaccacaggactattcctagccatgcactactcaccagacgcctcaaccgccttttcatcaatcgcccacatcactcgagacgtaaattatggctgaatcatccgctaccttcacgccaatggcgcctcaatattctttatctgcctcttcctacacatcgggcgaggcctatattacggatcatttctctactcagaaacctgaaacatcggcattatcctcctgcttgcaactatagcaacagccttcataggctatgtcctcccgtgaggccaaatatcattctgaggggccacagtaattacaaacttactatccgccatcccatacattgggacagacctagttcaatgaatctgaggaggctactcagtagacagtcccaccctcacacgattctttacctttcacttcatcttgcccttcattattgcagccctagcaacactccacctcctattcttgcacgaaacgggatcaaacaaccccctaggaatcacctcccattccgataaaatcaccttccacccttactacacaatcaaagacgccctcggcttacttctcttccttctctccttaatgacattaacactattctcaccagacctcctaggcgacccagacaattataccctagccaaccccttaaacacccctccccacatcaagcccgaatgatatttcctattcgcctacacaattctccgatccgtccctaacaaactaggaggcgtccttgccctattactatccatcctcatcctagcaataatccccatcctccatatatccaaacaacaaagcataatatttcgcccactaagccaatcactttattgactcctagccgcagacctcctcattctaacctgaatcggaggacaaccagtaagctacccttttaccatcattggacaagtagcatccgtactatacttcacaacaatcctaatcctaataccaactatctccctaattgaaaacaaaatactcaaatgggcctgtccttgtagtataaactaatacaccagtcttgtaaaccggagatgaaaacctttttccaaggacaaatcagagaaaaagtctttaactccaccattagcacccaaagctaagattctaatttaaactattctctgttctttcatggggaagcagatttgggtaccacccaagtattgactcacccatcaacaaccgctatgtatttcgtacattactgccagccaccatgaatattgtacggtaccataaatacttgaccacctgtagtacataaaaacccaatccacatcaaaaccccctccccatgcttacaagcaagtacagcaatcaaccctcaactatcacacatcaactgcaactccaaagccacccctcacccactaggataccaacaaacctacccacccttaacagtacatagtacataaagccatttaccgtacatagcacattacagtcaaatcccttctcgtccccatggatgacccccctcagataggggtcccttgaccaccatcctccgtgaaatcaatatcccgcacaagagtgctactctcctcgctccgggcccataacacttgggggtagctaaagtgaactgtatccgacatctggttcctacttcagggtcataaagcctaaatagcccacacgttccccttaaataagacatcacgatg

SEQ ID NO: 135 - DNA, 16569 bp, Homo sapiens mitochondrial DNA
  insertion (8426)..(8427): 8426.1INS G
gatcacaggtctatcaccctattaaccactcacgggagctctccatgcatttggtattttcgtctggggggtatgcacgcgatagcattgcgagacgctggagccggagcaccctatgtcgcagtatctgtctttgattcctgcctcatcctattatttatcgcacctacgttcaatattacaggcgaacatacttactaaagtgtgttaattaattaatgcttgtaggacataataataacaattgaatgtctgcacagccactttccacacagacatcataacaaaaaatttccaccaaaccccccctcccccgcttctggccacagcacttaaacacatctctgccaaaccccaaaaacaaagaaccctaacaccagcctaaccagatttcaaattttatcttttggcggtatgcacttttaacagtcaccccccaactaacacattattttcccctcccactcccatactactaatctcatcaatacaacccccgcccatcctacccagcacacacacaccgctgctaaccccataccccgaaccaaccaaaccccaaagacaccccccacagtttatgtagcttacctcctcaaagcaatacactgaaaatgtttagacgggctcacatcaccccataaacaaataggtttggtcctagcctttctattagctcttagtaagattacacatgcaagcatccccgttccagtgagttcaccctctaaatcaccacgatcaaaaggaacaagcatcaagcacgcagcaatgcagctcaaaacgcttagcctagccacacccccacgggaaacagcagtgattaacctttagcaataaacgaaagtttaactaagctatactaaccccagggttggtcaatttcgtgccagccaccgcggtcacacgattaacccaagtcaatagaagccggcgtaaagagtgttttagatcaccccctccccaataaagctaaaactcacctgagttgtaaaaaactccagttgacacaaaatagactacgaaagtggctttaacatatctgaacacacaatagctaagacccaaactgggattagataccccactatgcttagccctaaacctcaacagttaaatcaacaaaactgctcgccagaacactacgagccacagcttaaaactcaaaggacctggcggtgcttcatatccctctagaggagcctgttctgtaatcgataaaccccgatcaacctcaccacctcttgctcagcctatataccgccatcttcagcaaaccctgatgaaggctacaaagtaagcgcaagtacccacgtaaagacgttaggtcaaggtgtagcccatgaggtggcaagaaatgggctacattttctaccccagaaaactacgatagcccttatgaaacttaagggtcgaaggtggatttagcagtaaactaagagtagagtgcttagttgaacagggccctgaagcgcgtacacaccgcccgtcaccctcctcaagtatacttcaaaggacatttaactaaaacccctacgcatttatatagaggagacaagtcgtaacatggtaagtgtactggaaagtgcacttggacgaaccagagtgtagcttaacacaaagcacccaacttacacttaggagatttcaacttaacttgaccgctctgagctaaacctagccccaaacccactccaccttactaccagacaaccttagccaaaccatttacccaaataaagtataggcgatagaaattgaaacctggcgcaatagatatagtaccgcaagggaaagatgaaaaattataaccaagcataatatagcaaggactaacccctataccttctgcataatgaattaactagaaataactttgcaaggagagccaaagctaagacccccgaaaccagacgagctacctaagaacagctaaaagagcacacccgtctatgtagcaaaatagtgggaagatttataggtagaggcgacaaacctaccgagcctggtgatagctggttgtccaagatagaatcttagttcaactttaaatttgcccacagaaccctctaaatccccttgtaaatttaactgttagtccaaagaggaacagctctttggacactaggaaaaaaccttgtagagagagtaaaaaatttaacacccatagtaggcctaaaagcagccaccaattaagaaagcgttcaagctcaacacccactacctaaaaaatcccaaacatataactgaactcctcacacccaattggaccaatctatcaccctatagaagaactaatgttagtataagtaacatgaaaacattctcctccgcataagcctgcgtcagattaaaacactgaactgacaattaacagcccaatatctacaatcaaccaacaagtcattattaccctcactgtcaacccaacacaggcatgctcataaggaaaggttaaaaaaagtaaaaggaactcggcaaatcttaccccgcctgtttaccaaaaacatcacctctagcatcaccagtattagaggcaccgcctgcccagtgacacatgtttaacggccgcggtaccctaaccgtgcaaaggtagcataatcacttgttccttaaatagggacctgtatgaatggctccacgagggttcagctgtctcttacttttaaccagtgaaattgacctgcccgtgaagaggcgggcataacacagcaagacgagaagaccctatggagctttaatttattaatgcaaacagtacctaacaaacccacaggtcctaaactaccaaacctgcattaaaaatttcggttggggcgacctcggagcagaacccaacctccgagcagtacatgctaagacttcaccagtcaaagcgaactactatactcaattgatccaataacttgaccaacggaacaagttaccctagggataacagcgcaatcctattctagagtccatatcaacaatagggtttacgacctcgatgttggatcaggacatcccgatggtgcagccgctattaaaggttcgtttgttcaacgattaaagtcctacgtgatctgagttcagaccggagtaatccaggtcggtttctatctacttcaaattcctccctgtacgaaaggacaagagaaataaggcctacttcacaaagcgccttcccccgtaaatgatatcatctcaacttagtattatacccacacccacccaagaacagggtttgttaagatggcagagcccggtaatcgcataaaacttaaaactttacagtcagaggttcaattcctcttcttaacaacatacccatggccaacctcctactcctcattgtacccattctaatcgcaatggcattcctaatgcttaccgaacgaaaaattctaggctatatacaactacgcaaaggccccaacgttgtaggcccctacgggctactacaacccttcgctgacgccataaaactcttcaccaaagagcccctaaaacccgccacatctaccatcaccctctacatcaccgccccgaccttagctctcaccatcgctcttctactatgaacccccctccccatacccaaccccctggtcaacctcaacctaggcctcctatttattctagccacctctagcctagccgtttactcaatcctctgatcagggtgagcatcaaactcaaactacgccctgatcggcgcactgcgagcagtagcccaaacaatctcatatgaagtcaccctagccatcattctactatcaacattactaataagtggctcctttaacctctccacccttatcacaacacaagaacacctctgattactcctgccatcatgacccttggccataatatgatttatctccacactagcagagaccaaccgaacccccttcgaccttgccgaaggggagtccgaactagtctcaggcttcaacatcgaatacgccgcaggccccttcgccctattcttcatagccgaatacacaaacattattataataaacaccctcaccactacaatcttcctaggaacaacatatgacgcactctcccctgaactctacacaacatattttgtcaccaagaccctacttctaacctccctgttcttatgaattcgaacagcatacccccgattccgctacgaccaactcatacacctcctatgaaaaaacttcctaccactcaccctagcattacttatatgatatgtctccatacccattacaatctccagcattccccctcaaacctaagaaatatgtctgataaaagagttactttgatagagtaaataataggagcttaaacccccttatttctaggactatgagaatcgaacccatccctgagaatccaaaattctccgtgccacctatcacaccccatcctaaagtaaggtcagctaaataagctatcgggcccataccccgaaaatgttggttatacccttcccgtactaattaatcccctggcccaacccgtcatctactctaccatctttgcaggcacactcatcacagcgctaagctcgcactgattttttacctgagtaggcctagaaataaacatgctagcttttattccagttctaaccaaaaaaataaaccctcgttccacagaagctgccatcaagtatttcctcacgcaagcaaccgcatccataatccttctaatagctatcctcttcaacaatatactctccggacaatgaaccataaccaatactaccaatcaatactcatcattaataatcataatagctatagcaataaaactaggaatagccccctttcacttctgagtcccagaggttacccaaggcacccctctgacatccggcctgcttcttctcacatgacaaaaactagcccccatctcaatcatataccaaatctctccctcactaaacgtaagccttctcctcactctctcaatcttatccatcatagcaggcagttgaggtggattaaaccaaacccagctacgcaaaatcttagcatactcctcaattacccacataggatgaataatagcagttctaccgtacaaccctaacataaccattcttaatttaactatttatattatcctaactactaccgcattcctactactcaacttaaactccagcaccacgaccctactactatctcgcacctgaaacaagctaacatgactaacacccttaattccatccaccctcctctccctaggaggcctgcccccgctaaccggctttttgcccaaatgggccattatcgaagaattcacaaaaaacaatagcctcatcatccccaccatcatagccaccatcaccctccttaacctctacttctacctacgcctaatctactccacctcaatcacactactccccatatctaacaacgtaaaaataaaatgacagtttgaacatacaaaacccaccccattcctccccacactcatcgcccttaccacgctactcctacctatctccccttttatactaataatcttatagaaatttaggttaaatacagaccaagagccttcaaagccctcagtaagttgcaatacttaatttctgtaacagctaaggactgcaaaaccccactctgcatcaactgaacgcaaatcagccactttaattaagctaagcccttactagaccaatgggacttaaacccacaaacacttagttaacagctaagcaccctaatcaactggcttcaatctacttctcccgccgccgggaaaaaaggcgggagaagccccggcaggtttgaagctgcttcttcgaatttgcaattcaatatgaaaatcacctcggagctggtaaaaagaggcctaacccctgtctttagatttacagtccaatgcttcactcagccattttacctcacccccactgatgttcgccgaccgttgactattctctacaaaccacaaagacattggaacactatacctattattcggcgcatgagctggagtcctaggcacagctctaagcctccttattcgagccgagctgggccagccaggcaaccttctaggtaacgaccacatctacaacgttatcgtcacagcccatgcatttgtaataatcttcttcatagtaatacccatcataatcggaggctttggcaactgactagttcccctaataatcggtgcccccgatatggcgtttccccgcataaacaacataagcttctgactcttacctccctctctcctactcctgctcgcatctgctatagtggaggccggagcaggaacaggttgaacagtctaccctcccttagcagggaactactcccaccctggagcctccgtagacctaaccatcttctccttacacctagcaggtgtctcctctatcttaggggccatcaatttcatcacaacaattatcaatataaaaccccctgccataacccaataccaaacgcccctcttcgtctgatccgtcctaatcacagcagtcctacttctcctatctctcccagtcctagctgctggcatcactatactactaacagaccgcaacctcaacaccaccttcttcgaccccgccggaggaggagaccccattctataccaacacctattctgatttttcggtcaccctgaagtttatattcttatcctaccaggcttcggaataatctcccatattgtaacttactactccggaaaaaaagaaccatttggatacataggtatggtctgagctatgatatcaattggcttcctagggtttatcgtgtgagcacaccatatatttacagtaggaatagacgtagacacacgagcatatttcacctccgctaccataatcatcgctatccccaccggcgtcaaagtatttagctgactcgccacactccacggaagcaatatgaaatgatctgctgcagtgctctgagccctaggattcatctttcttttcaccgtaggtggcctgactggcattgtattagcaaactcatcactagacatcgtactacacgacacgtactacgttgtagcccacttccactatgtcctatcaataggagctgtatttgccatcataggaggcttcattcactgatttcccctattctcaggctacaccctagaccaaacctacgccaaaatccatttcactatcatattcatcggcgtaaatctaactttcttcccacaacactttctcggcctatccggaatgccccgacgttactcggactaccccgatgcatacaccacatgaaacatcctatcatctgtaggctcattcatttctctaacagcagtaatattaataattttcatgatttgagaagccttcgcttcgaagcgaaaagtcctaatagtagaagaaccctccataaacctggagtgactatatggatgccccccaccctaccacacattcgaagaacccgtatacataaaatctagacaaaaaaggaaggaatcgaaccccccaaagctggtttcaagccaaccccatggcctccatgactttttcaaaaaggtattagaaaaaccatttcataactttgtcaaagttaaattataggctaaatcctatatatcttaatggcacatgcagcgcaagtaggtctacaagacgctacttcccctatcatagaagagcttatcacctttcatgatcacgccctcataatcattttccttatctgcttcctagtcctgtatgcccttttcctaacactcacaacaaaactaactaatactaacatctcagacgctcaggaaatagaaaccgtctgaactatcctgcccgccatcatcctagtcctcatcgccctcccatccctacgcatcctttacataacagacgaggtcaacgatccctcccttaccatcaaatcaattggccaccaatggtactgaacctacgagtacaccgactacggcggactaatcttcaactcctacatacttcccccattattcctagaaccaggcgacctgcgactccttgacgttgacaatcgagtagtactcccgattgaagcccccattcgtataataattacatcacaagacgtcttgcactcatgagctgtccccacattaggcttaaaaacagatgcaattcccggacgtctaaaccaaaccactttcaccgctacacgaccgggggtatactacggtcaatgctctgaaatctgtggagcaaaccacagtttcatgcccatcgtcctagaattaattcccctaaaaatctttgaaatagggcccgtatttaccctatagcaccccctctaccccctctagagcccactgtaaagctaacttagcattaaccttttaagttaaagattaagagaaccaacacctctttacagtgaaatgccccaactaaatactaccgtatggcccaccataattacccccatactccttacactatgtcctcatcacccaactaaaaatattaaacacaaactaccacctacctccctcaccaaagcccataaaaataaaaaattataacaaaccctgagaaccaaaatgaacgaaaatctgttcgcttcattcattgcccccacaatcctaggcctacccgccgcagtactgatcattctatttccccctctattgatccccacctccaaatatctcatcaacaaccgactaatcaccacccaacaatgactaatcaaactaacctcaaaacaaatgataaccatacacaacactaaaggacgaacctgatctcttatactagtatccttaatcatttttattgccacaactaacctcctcggactcctgcctcactcatttacaccaaccacccaactatctataaacctagccatggccatccccttatgagcgggcacagtgattataggctttcgctctaagattaaaaatgccctagcccacttcttaccacaaggcacacctacaccccttatccccatactagttattatcgaaaccatcagcctactcattcaaccaatagccctggccgtacgcctaaccgctaacattactgcaggccacctactcatgcacctaattggaagcgccaccctagcaatatcaaccattaaccttccctctacacttatcatcttcacaattctaattctactgactatcctagaaatcgctgtcgccttaatccaagcctacgttttcacacttctagtaagcctctacctgcacgacaacacataatgacccaccaatcacatgcctatcatatagtaaaacccagcccatgacccctaacaggggccctctcagccctcctaatgacctccggcctagccatgtgatttcacttccactccataacgctcctcatactaggcctactaaccaacacactaaccatataccaatgatggcgcgatgtaacacgagaaagcacataccaaggccaccacacaccacctgtccaaaaaggccttcgatacgggataatcctatttattacctcagaagtttttttcttcgcaggatttttctgagccttttaccactccagcctagcccctaccccccaattaggagggcactggcccccaacaggcatcaccccgctaaatcccctagaagtcccactcctaaacacatccgtattactcgcatcaggagtatcaatcacctgagctcaccatagtctaatagaaaacaaccgaaaccaaataattcaagcactgcttattacaattttactgggtctctattttaccctcctacaagcctcagagtacttcgagtctcccttcaccatttccgacggcatctacggctcaacattttttgtagccacaggcttccacggacttcacgtcattattggctcaactttcctcactatctgcttcatccgccaactaatatttcactttacatccaaacatcactttggcttcgaagccgccgcctgatactggcattttgtagatgtggtttgactatttctgtatgtctccatctattgatgagggtcttactcttttagtataaatagtaccgttaacttccaattaactagttttgacaacattcaaaaaagagtaataaacttcgccttaattttaataatcaacaccctcctagccttactactaataattattacattttgactaccacaactcaacggctacatagaaaaatccaccccttacgagtgcggcttcgaccctatatcccccgcccgcgtccctttctccataaaattcttcttagtagctattaccttcttattatttgatctagaaattgccctccttttacccctaccatgagccctacaaacaactaacctgccactaatagttatgtcatccctcttattaatcatcatcctagccctaagtctggcctatgagtgactacaaaaaggattagactgaaccgaattggtatatagtttaaacaaaacgaatgatttcgactcattaaattatgataatcatatttaccaaatgcccctcatttacataaatattatactagcatttaccatctcacttctaggaatactagtatatcgctcacacctcatatcctccctactatgcctagaaggaataatactatcgctgttcattatagctactctcataaccctcaacacccactccctcttagccaatattgtgcctattgccatactagtctttgccgcctgcgaagcagcggtgggcctagccctactagtctcaatctccaacacatatggcctagactacgtacataacctaaacctactccaatgctaaaactaatcgtcccaacaattatattactaccactgacatgactttccaaaaaacacataatttgaatcaacacaaccacccacagcctaattattagcatcatccctctactattttttaaccaaatcaacaacaacctatttagctgttccccaaccttttcctccgaccccctaacaacccccctcctaatactaactacctgactcctacccctcacaatcatggcaagccaacgccacttatccagtgaaccactatcacgaaaaaaactctacctctctatactaatctccctacaaatctccttaattataacattcacagccacagaactaatcatattttatatcttcttcgaaaccacacttatccccaccttggctatcatcacccgatgaggcaaccagccagaacgcctgaacgcaggcacatacttcctattctacaccctagtaggctcccttcccctactcatcgcactaatttacactcacaacaccctaggctcactaaacattctactactcactctcactgcccaagaactatcaaactcctgagccaacaacttaatatgactagcttacacaatagcttttatagtaaagatacctctttacggactccacttatgactccctaaagcccatgtcgaagcccccatcgctgggtcaatagtacttgccgcagtactcttaaaactaggcggctatggtataatacgcctcacactcattctcaaccccctgacaaaacacatagcctaccccttccttgtactatccctatgaggcataattataacaagctccatctgcctacgacaaacagacctaaaatcgctcattgcatactcttcaatcagccacatagccctcgtagtaacagccattctcatccaaaccccctgaagcttcaccggcgcagtcattctcataatcgcccacgggcttacatcctcattactattctgcctagcaaactcaaactacgaacgcactcacagtcgcatcataatcctctctcaaggacttcaaactctactcccactaatagctttttgatgacttctagcaagcctcgctaacctcgccttaccccccactattaacctactgggagaactctctgtgctagtaaccacgttctcctgatcaaatatcactctcctacttacaggactcaacatactagtcacagccctatactccctctacatatttaccacaacacaatggggctcactcacccaccacattaacaacataaaaccctcattcacacgagaaaacaccctcatgttcatacacctatcccccattctcctcctatccctcaaccccgacatcattaccgggttttcctcttgtaaatatagtttaaccaaaacatcagattgtgaatctgacaacagaggcttacgaccccttatttaccgagaaagctcacaagaactgctaactcatgcccccatgtctaacaacatggctttctcaacttttaaaggataacagctatccattggtcttaggccccaaaaattttggtgcaactccaaataaaagtaataaccatgcacactactataaccaccctaaccctgacttccctaattccccccatccttaccaccctcgttaaccctaacaaaaaaaactcatacccccattatgtaaaatccattgtcgcatccacctttattatcagtctcttccccacaacaatattcatgtgcctagaccaagaagttattatctcgaactgacactgagccacaacccaaacaacccagctctccctaagcttcaaactagactacttctccataatattcatccctgtagcattgttcgttacatggtccatcatagaattctcactgtgatatataaactcagacccaaacattaatcagttcttcaaatatctactcatcttcctaattaccatactaatcttagttaccgctaacaacctattccaactgttcatcggctgagagggcgtaggaattatatccttcttgctcatcagttgatgatacgcccgagcagatgccaacacagcagccattcaagcaatcctatacaaccgtatcggcgatatcggtttcatcctcgccttagcatgatttatcctacactccaactcatgagacccacaacaaatagcccttctaaacgctaatccaagcctcaccccactactaggcctcctcctagcagcagcaggcaaatcagcccaattaggtctccacccctgactcccctcagccatagaaggccccaccccagtctcagccctactccactcaagcactatagttgtagcaggaatcttcttactcatccgcttccaccccctagcagaaaatagcccactaatccaaactctaacactatgcttaggcgctatcaccactctgttcgcagcagtctgcgcccttacacaaaatgacatcaaaaaaatcgtagccttctccacttcaagtcaactaggactcataatagttacaatcggcatcaaccaaccacacctagcattcctgcacatctgtacccacgccttcttcaaagccatactatttatgtgctccgggtccatcatccacaaccttaacaatgaacaagatattcgaaaaataggaggactactcaaaaccatacctctcacttcaacctccctcaccattggcagcctagcattagcaggaatacctttcctcacaggtttctactccaaagaccacatcatcgaaaccgcaaacatatcatacacaaacgcctgagccctatctattactctcatcgctacctccctgacaagcgcctatagcactcgaataattcttctcaccctaacaggtcaacctcgcttccccacccttactaacattaacgaaaataaccccaccctactaaaccccattaaacgcctggcagccggaagcctattcgcaggatttctcattactaacaacatttcccccgcatcccccttccaaacaacaatccccctctacctaaaactcacagccctcgctgtcactttcctaggacttctaacagccctagacctcaactacctaaccaacaaacttaaaataaaatccccactatgcacattttatttctccaacatactcggattctaccctagcatcacacaccgcacaatcccctatctaggccttcttacgagccaaaacctgcccctactcctcctagacctaacctgactagaaaagctattacctaaaacaatttcacagcaccaaatctccacctccatcatcacctcaacccaaaaaggcataattaaactttacttcctctctttcttcttcccactcatcctaaccctactcctaatcacataacctattcccccgagcaatctcaattacaatatatacaccaacaaacaatgttcaaccagtaactactactaatcaacgcccataatcatacaaagcccccgcaccaataggatcctcccgaatcaaccctgacccctctccttcataaattattcagcttcctacactattaaagtttaccacaaccaccaccccatcatactctttcacccacagcaccaatcctacctccatcgctaaccccactaaaacactcaccaagacctcaacccctgacccccatgcctcaggatactcctcaatagccatcgctgtagtatatccaaagacaaccatcattccccctaaataaattaaaaaaactattaaacccatataacctcccccaaaattcagaataataacacacccgaccacaccgctaacaatcaatactaaacccccataaataggagaaggcttagaagaaaaccccacaaaccccattactaaacccacactcaacagaaacaaagcatacatcattattctcgcacggactacaaccacgaccaatgatatgaaaaaccatcgttgtatttcaactacaagaacaccaatgaccccaatacgcaaaactaaccccctaataaaattaattaaccactcattcatcgacctccccaccccatccaacatctccgcatgatgaaacttcggctcactccttggcgcctgcctgatcctccaaatcaccacaggactattcctagccatgcactactcaccagacgcctcaaccgccttttcatcaatcgcccacatcactcgagacgtaaattatggctgaatcatccgctaccttcacgccaatggcgcctcaatattctttatctgcctcttcctacacatcgggcgaggcctatattacggatcatttctctactcagaaacctgaaacatcggcattatcctcctgcttgcaactatagcaacagccttcataggctatgtcctcccgtgaggccaaatatcattctgaggggccacagtaattacaaacttactatccgccatcccatacattgggacagacctagttcaatgaatctgaggaggctactcagtagacagtcccaccctcacacgattctttacctttcacttcatcttgcccttcattattgcagccctagcaacactccacctcctattcttgcacgaaacgggatcaaacaaccccctaggaatcacctcccattccgataaaatcaccttccacccttactacacaatcaaagacgccctcggcttacttctcttccttctctccttaatgacattaacactattctcaccagacctcctaggcgacccagacaattataccctagccaaccccttaaacacccctccccacatcaagcccgaatgatatttcctattcgcctacacaattctccgatccgtccctaacaaactaggaggcgtccttgccctattactatccatcctcatcctagcaataatccccatcctccatatatccaaacaacaaagcataatatttcgcccactaagccaatcactttattgactcctagccgcagacctcctcattctaacctgaatcggaggacaaccagtaagctacccttttaccatcattggacaagtagcatccgtactatacttcacaacaatcctaatcctaataccaactatctccctaattgaaaacaaaatactcaaatgggcctgtccttgtagtataaactaatacaccagtcttgtaaaccggagatgaaaacctttttccaaggacaaatcagagaaaaagtctttaactccaccattagcacccaaagctaagattctaatttaaactattctctgttctttcatggggaagcagatttgggtaccacccaagtattgactcacccatcaacaaccgctatgtatttcgtacattactgccagccaccatgaatattgtacggtaccataaatacttgaccacctgtagtacataaaaacccaatccacatcaaaaccccctccccatgcttacaagcaagtacagcaatcaaccctcaactatcacacatcaactgcaactccaaagccacccctcacccactaggataccaacaaacctacccacccttaacagtacatagtacataaagccatttaccgtacatagcacattacagtcaaatcccttctcgtccccatggatgacccccctcagataggggtcccttgaccaccatcctccgtgaaatcaatatcccgcacaagagtgctactctcctcgctccgggcccataacacttgggggtagctaaagtgaactgtatccgacatctggttcctacttcagggtcataaagcctaaatagcccacacgttccccttaaataagacatcacgatg

SEQ ID NO: 136 - DNA, 16569 bp, Homo sapiens mitochondrial DNA
  insertion (15826)..(15827): 15826.1INS G
gatcacaggtctatcaccctattaaccactcacgggagctctccatgcatttggtattttcgtctggggggtatgcacgcgatagcattgcgagacgctggagccggagcaccctatgtcgcagtatctgtctttgattcctgcctcatcctattatttatcgcacctacgttcaatattacaggcgaacatacttactaaagtgtgttaattaattaatgcttgtaggacataataataacaattgaatgtctgcacagccactttccacacagacatcataacaaaaaatttccaccaaaccccccctcccccgcttctggccacagcacttaaacacatctctgccaaaccccaaaaacaaagaaccctaacaccagcctaaccagatttcaaattttatcttttggcggtatgcacttttaacagtcaccccccaactaacacattattttcccctcccactcccatactactaatctcatcaatacaacccccgcccatcctacccagcacacacacaccgctgctaaccccataccccgaaccaaccaaaccccaaagacaccccccacagtttatgtagcttacctcctcaaagcaatacactgaaaatgtttagacgggctcacatcaccccataaacaaataggtttggtcctagcctttctattagctcttagtaagattacacatgcaagcatccccgttccagtgagttcaccctctaaatcaccacgatcaaaaggaacaagcatcaagcacgcagcaatgcagctcaaaacgcttagcctagccacacccccacgggaaacagcagtgattaacctttagcaataaacgaaagtttaactaagctatactaaccccagggttggtcaatttcgtgccagccaccgcggtcacacgattaacccaagtcaatagaagccggcgtaaagagtgttttagatcaccccctccccaataaagctaaaactcacctgagttgtaaaaaactccagttgacacaaaatagactacgaaagtggctttaacatatctgaacacacaatagctaagacccaaactgggattagataccccactatgcttagccctaaacctcaacagttaaatcaacaaaactgctcgccagaacactacgagccacagcttaaaactcaaaggacctggcggtgcttcatatccctctagaggagcctgttctgtaatcgataaaccccgatcaacctcaccacctcttgctcagcctatataccgccatcttcagcaaaccctgatgaaggctacaaagtaagcgcaagtacccacgtaaagacgttaggtcaaggtgtagcccatgaggtggcaagaaatgggctacattttctaccccagaaaactacgatagcccttatgaaacttaagggtcgaaggtggatttagcagtaaactaagagtagagtgcttagttgaacagggccctgaagcgcgtacacaccgcccgtcaccctcctcaagtatacttcaaaggacatttaactaaaacccctacgcatttatatagaggagacaagtcgtaacatggtaagtgtactggaaagtgcacttggacgaaccagagtgtagcttaacacaaagcacccaacttacacttaggagatttcaacttaacttgaccgctctgagctaaacctagccccaaacccactccaccttactaccagacaaccttagccaaaccatttacccaaataaagtataggcgatagaaattgaaacctggcgcaatagatatagtaccgcaagggaaagatgaaaaattataaccaagcataatatagcaaggactaacccctataccttctgcataatgaattaactagaaataactttgcaaggagagccaaagctaagacccccgaaaccagacgagctacctaagaacagctaaaagagcacacccgtctatgtagcaaaatagtgggaagatttataggtagaggcgacaaacctaccgagcctggtgatagctggttgtccaagatagaatcttagttcaactttaaatttgcccacagaaccctctaaatccccttgtaaatttaactgttagtccaaagaggaacagctctttggacactaggaaaaaaccttgtagagagagtaaaaaatttaacacccatagtaggcctaaaagcagccaccaattaagaaagcgttcaagctcaacacccactacctaaaaaatcccaaacatataactgaactcctcacacccaattggaccaatctatcaccctatagaagaactaatgttagtataagtaacatgaaaacattctcctccgcataagcctgcgtcagattaaaacactgaactgacaattaacagcccaatatctacaatcaaccaacaagtcattattaccctcactgtcaacccaacacaggcatgctcataaggaaaggttaaaaaaagtaaaaggaactcggcaaatcttaccccgcctgtttaccaaaaacatcacctctagcatcaccagtattagaggcaccgcctgcccagtgacacatgtttaacggccgcggtaccctaaccgtgcaaaggtagcataatcacttgttccttaaatagggacctgtatgaatggctccacgagggttcagctgtctcttacttttaaccagtgaaattgacctgcccgtgaagaggcgggcataacacagcaagacgagaagaccctatggagctttaatttattaatgcaaacagtacctaacaaacccacaggtcctaaactaccaaacctgcattaaaaatttcggttggggcgacctcggagcagaacccaacctccgagcagtacatgctaagacttcaccagtcaaagcgaactactatactcaattgatccaataacttgaccaacggaacaagttaccctagggataacagcgcaatcctattctagagtccatatcaacaatagggtttacgacctcgatgttggatcaggacatcccgatggtgcagccgctattaaaggttcgtttgttcaacgattaaagtcctacgtgatctgagttcagaccggagtaatccaggtcggtttctatctacttcaaattcctccctgtacgaaaggacaagagaaataaggcctacttcacaaagcgccttcccccgtaaatgatatcatctcaacttagtattatacccacacccacccaagaacagggtttgttaagatggcagagcccggtaatcgcataaaacttaaaactttacagtcagaggttcaattcctcttcttaacaacatacccatggccaacctcctactcctcattgtacccattctaatcgcaatggcattcctaatgcttaccgaacgaaaaattctaggctatatacaactacgcaaaggccccaacgttgtaggcccctacgggctactacaacccttcgctgacgccataaaactcttcaccaaagagcccctaaaacccgccacatctaccatcaccctctacatcaccgccccgaccttagctctcaccatcgctcttctactatgaacccccctccccatacccaaccccctggtcaacctcaacctaggcctcctatttattctagccacctctagcctagccgtttactcaatcctctgatcagggtgagcatcaaactcaaactacgccctgatcggcgcactgcgagcagtagcccaaacaatctcatatgaagtcaccctagccatcattctactatcaacattactaataagtggctcctttaacctctccacccttatcacaacacaagaacacctctgattactcctgccatcatgacccttggccataatatgatttatctccacactagcagagaccaaccgaacccccttcgaccttgccgaaggggagtccgaactagtctcaggcttcaacatcgaatacgccgcaggccccttcgccctattcttcatagccgaatacacaaacattattataataaacaccctcaccactacaatcttcctaggaacaacatatgacgcactctcccctgaactctacacaacatattttgtcaccaagaccctacttctaacctccctgttcttatgaattcgaacagcatacccccgattccgctacgaccaactcatacacctcctatgaaaaaacttcctaccactcaccctagcattacttatatgatatgtctccatacccattacaatctccagcattccccctcaaacctaagaaatatgtctgataaaagagttactttgatagagtaaataataggagcttaaacccccttatttctaggactatgagaatcgaacccatccctgagaatccaaaattctccgtgccacctatcacaccccatcctaaagtaaggtcagctaaataagctatcgggcccataccccgaaaatgttggttatacccttcccgtactaattaatcccctggcccaacccgtcatctactctaccatctttgcaggcacactcatcacagcgctaagctcgcactgattttttacctgagtaggcctagaaataaacatgctagcttttattccagttctaaccaaaaaaataaaccctcgttccacagaagctgccatcaagtatttcctcacgcaagcaaccgcatccataatccttctaatagctatcctcttcaacaatatactctccggacaatgaaccataaccaatactaccaatcaatactcatcattaataatcataatagctatagcaataaaactaggaatagccccctttcacttctgagtcccagaggttacccaaggcacccctctgacatccggcctgcttcttctcacatgacaaaaactagcccccatctcaatcatataccaaatctctccctcactaaacgtaagccttctcctcactctctcaatcttatccatcatagcaggcagttgaggtggattaaaccaaacccagctacgcaaaatcttagcatactcctcaattacccacataggatgaataatagcagttctaccgtacaaccctaacataaccattcttaatttaactatttatattatcctaactactaccgcattcctactactcaacttaaactccagcaccacgaccctactactatctcgcacctgaaacaagctaacatgactaacacccttaattccatccaccctcctctccctaggaggcctgcccccgctaaccggctttttgcccaaatgggccattatcgaagaattcacaaaaaacaatagcctcatcatccccaccatcatagccaccatcaccctccttaacctctacttctacctacgcctaatctactccacctcaatcacactactccccatatctaacaacgtaaaaataaaatgacagtttgaacatacaaaacccaccccattcctccccacactcatcgcccttaccacgctactcctacctatctccccttttatactaataatcttatagaaatttaggttaaatacagaccaagagccttcaaagccctcagtaagttgcaatacttaatttctgtaacagctaaggactgcaaaaccccactctgcatcaactgaacgcaaatcagccactttaattaagctaagcccttactagaccaatgggacttaaacccacaaacacttagttaacagctaagcaccctaatcaactggcttcaatctacttctcccgccgccgggaaaaaaggcgggagaagccccggcaggtttgaagctgcttcttcgaatttgcaattcaatatgaaaatcacctcggagctggtaaaaagaggcctaacccctgtctttagatttacagtccaatgcttcactcagccattttacctcacccccactgatgttcgccgaccgttgactattctctacaaaccacaaagacattggaacactatacctattattcggcgcatgagctggagtcctaggcacagctctaagcctccttattcgagccgagctgggccagccaggcaaccttctaggtaacgaccacatctacaacgttatcgtcacagcccatgcatttgtaataatcttcttcatagtaatacccatcataatcggaggctttggcaactgactagttcccctaataatcggtgcccccgatatggcgtttccccgcataaacaacataagcttctgactcttacctccctctctcctactcctgctcgcatctgctatagtggaggccggagcaggaacaggttgaacagtctaccctcccttagcagggaactactcccaccctggagcctccgtagacctaaccatcttctccttacacctagcaggtgtctcctctatcttaggggccatcaatttcatcacaacaattatcaatataaaaccccctgccataacccaataccaaacgcccctcttcgtctgatccgtcctaatcacagcagtcctacttctcctatctctcccagtcctagctgctggcatcactatactactaacagaccgcaacctcaacaccaccttcttcgaccccgccggaggaggagaccccattctataccaacacctattctgatttttcggtcaccctgaagtttatattcttatcctaccaggcttcggaataatctcccatattgtaacttactactccggaaaaaaagaaccatttggatacataggtatggtctgagctatgatatcaattggcttcctagggtttatcgtgtgagcacaccatatatttacagtaggaatagacgtagacacacgagcatatttcacctccgctaccataatcatcgctatccccaccggcgtcaaagtatttagctgactcgccacactccacggaagcaatatgaaatgatctgctgcagtgctctgagccctaggattcatctttcttttcaccgtaggtggcctgactggcattgtattagcaaactcatcactagacatcgtactacacgacacgtactacgttgtagcccacttccactatgtcctatcaataggagctgtatttgccatcataggaggcttcattcactgatttcccctattctcaggctacaccctagaccaaacctacgccaaaatccatttcactatcatattcatcggcgtaaatctaactttcttcccacaacactttctcggcctatccggaatgccccgacgttactcggactaccccgatgcatacaccacatgaaacatcctatcatctgtaggctcattcatttctctaacagcagtaatattaataattttcatgatttgagaagccttcgcttcgaagcgaaaagtcctaatagtagaagaaccctccataaacctggagtgactatatggatgccccccaccctaccacacattcgaagaacccgtatacataaaatctagacaaaaaaggaaggaatcgaaccccccaaagctggtttcaagccaaccccatggcctccatgactttttcaaaaaggtattagaaaaaccatttcataactttgtcaaagttaaattataggctaaatcctatatatcttaatggcacatgcagcgcaagtaggtctacaagacgctacttcccctatcatagaagagcttatcacctttcatgatcacgccctcataatcattttccttatctgcttcctagtcctgtatgcccttttcctaacactcacaacaaaactaactaatactaacatctcagacgctcaggaaatagaaaccgtctgaactatcctgcccgccatcatcctagtcctcatcgccctcccatccctacgcatcctttacataacagacgaggtcaacgatccctcccttaccatcaaatcaattggccaccaatggtactgaacctacgagtacaccgactacggcggactaatcttcaactcctacatacttcccccattattcctagaaccaggcgacctgcgactccttgacgttgacaatcgagtagtactcccgattgaagcccccattcgtataataattacatcacaagacgtcttgcactcatgagctgtccccacattaggcttaaaaacagatgcaattcccggacgtctaaaccaaaccactttcaccgctacacgaccgggggtatactacggtcaatgctctgaaatctgtggagcaaaccacagtttcatgcccatcgtcctagaattaattcccctaaaaatctttgaaatagggcccgtatttaccctatagcaccccctctaccccctctagagcccactgtaaagctaacttagcattaaccttttaagttaaagattaagagaaccaacacctctttacagtgaaatgccccaactaaatactaccgtatggcccaccataattacccccatactccttacactattcctcatcacccaactaaaaatattaaacacaaactaccacctacctccctcaccaaagcccataaaaataaaaaattataacaaaccctgagaaccaaaatgaacgaaaatctgttcgcttcattcattgcccccacaatcctaggcctacccgccgcagtactgatcattctatttccccctctattgatccccacctccaaatatctcatcaacaaccgactaatcaccacccaacaatgactaatcaaactaacctcaaaacaaatgataaccatacacaacactaaaggacgaacctgatctcttatactagtatccttaatcatttttattgccacaactaacctcctcggactcctgcctcactcatttacaccaaccacccaactatctataaacctagccatggccatccccttatgagcgggcacagtgattataggctttcgctctaagattaaaaatgccctagcccacttcttaccacaaggcacacctacaccccttatccccatactagttattatcgaaaccatcagcctactcattcaaccaatagccctggccgtacgcctaaccgctaacattactgcaggccacctactcatgcacctaattggaagcgccaccctagcaatatcaaccattaaccttccctctacacttatcatcttcacaattctaattctactgactatcctagaaatcgctgtcgccttaatccaagcctacgttttcacacttctagtaagcctctacctgcacgacaacacataatgacccaccaatcacatgcctatcatatagtaaaacccagcccatgacccctaacaggggccctctcagccctcctaatgacctccggcctagccatgtgatttcacttccactccataacgctcctcatactaggcctactaaccaacacactaaccatataccaatgatggcgcgatgtaacacgagaaagcacataccaaggccaccacacaccacctgtccaaaaaggccttcgatacgggataatcctatttattacctcagaagtttttttcttcgcaggatttttctgagccttttaccactccagcctagcccctaccccccaattaggagggcactggcccccaacaggcatcaccccgctaaatcccctagaagtcccactcctaaacacatccgtattactcgcatcaggagtatcaatcacctgagctcaccatagtctaatagaaaacaaccgaaaccaaataattcaagcactgcttattacaattttactgggtctctattttaccctcctacaagcctcagagtacttcgagtctcccttcaccatttccgacggcatctacggctcaacattttttgtagccacaggcttccacggacttcacgtcattattggctcaactttcctcactatctgcttcatccgccaactaatatttcactttacatccaaacatcactttggcttcgaagccgccgcctgatactggcattttgtagatgtggtttgactatttctgtatgtctccatctattgatgagggtcttactcttttagtataaatagtaccgttaacttccaattaactagttttgacaacattcaaaaaagagtaataaacttcgccttaattttaataatcaacaccctcctagccttactactaataattattacattttgactaccacaactcaacggctacatagaaaaatccaccccttacgagtgcggcttcgaccctatatcccccgcccgcgtccctttctccataaaattcttcttagtagctattaccttcttattatttgatctagaaattgccctccttttacccctaccatgagccctacaaacaactaacctgccactaatagttatgtcatccctcttattaatcatcatcctagccctaagtctggcctatgagtgactacaaaaaggattagactgaaccgaattggtatatagtttaaacaaaacgaatgatttcgactcattaaattatgataatcatatttaccaaatgcccctcatttacataaatattatactagcatttaccatctcacttctaggaatactagtatatcgctcacacctcatatcctccctactatgcctagaaggaataatactatcgctgttcattatagctactctcataaccctcaacacccactccctcttagccaatattgtgcctattgccatactagtctttgccgcctgcgaagcagcggtgggcctagccctactagtctcaatctccaacacatatggcctagactacgtacataacctaaacctactccaatgctaaaactaatcgtcccaacaattatattactaccactgacatgactttccaaaaaacacataatttgaatcaacacaaccacccacagcctaattattagcatcatccctctactattttttaaccaaatcaacaacaacctatttagctgttccccaaccttttcctccgaccccctaacaacccccctcctaatactaactacctgactcctacccctcacaatcatggcaagccaacgccacttatccagtgaaccactatcacgaaaaaaactctacctctctatactaatctccctacaaatctccttaattataacattcacagccacagaactaatcatattttatatcttcttcgaaaccacacttatccccaccttggctatcatcacccgatgaggcaaccagccagaacgcctgaacgcaggcacatacttcctattctacaccctagtaggctcccttcccctactcatcgcactaatttacactcacaacaccctaggctcactaaacattctactactcactctcactgcccaagaactatcaaactcctgagccaacaacttaatatgactagcttacacaatagcttttatagtaaagatacctctttacggactccacttatgactccctaaagcccatgtcgaagcccccatcgctgggtcaatagtacttgccgcagtactcttaaaactaggcggctatggtataatacgcctcacactcattctcaaccccctgacaaaacacatagcctaccccttccttgtactatccctatgaggcataattataacaagctccatctgcctacgacaaacagacctaaaatcgctcattgcatactcttcaatcagccacatagccctcgtagtaacagccattctcatccaaaccccctgaagcttcaccggcgcagtcattctcataatcgcccacgggcttacatcctcattactattctgcctagcaaactcaaactacgaacgcactcacagtcgcatcataatcctctctcaaggacttcaaactctactcccactaatagctttttgatgacttctagcaagcctcgctaacctcgccttaccccccactattaacctactgggagaactctctgtgctagtaaccacgttctcctgatcaaatatcactctcctacttacaggactcaacatactagtcacagccctatactccctctacatatttaccacaacacaatggggctcactcacccaccacattaacaacataaaaccctcattcacacgagaaaacaccctcatgttcatacacctatcccccattctcctcctatccctcaaccccgacatcattaccgggttttcctcttgtaaatatagtttaaccaaaacatcagattgtgaatctgacaacagaggcttacgaccccttatttaccgagaaagctcacaagaactgctaactcatgcccccatgtctaacaacatggctttctcaacttttaaaggataacagctatccattggtcttaggccccaaaaattttggtgcaactccaaataaaagtaataaccatgcacactactataaccaccctaaccctgacttccctaattccccccatccttaccaccctcgttaaccctaacaaaaaaaactcatacccccattatgtaaaatccattgtcgcatccacctttattatcagtctcttccccacaacaatattcatgtgcctagaccaagaagttattatctcgaactgacactgagccacaacccaaacaacccagctctccctaagcttcaaactagactacttctccataatattcatccctgtagcattgttcgttacatggtccatcatagaattctcactgtgatatataaactcagacccaaacattaatcagttcttcaaatatctactcatcttcctaattaccatactaatcttagttaccgctaacaacctattccaactgttcatcggctgagagggcgtaggaattatatccttcttgctcatcagttgatgatacgcccgagcagatgccaacacagcagccattcaagcaatcctatacaaccgtatcggcgatatcggtttcatcctcgccttagcatgatttatcctacactccaactcatgagacccacaacaaatagcccttctaaacgctaatccaagcctcaccccactactaggcctcctcctagcagcagcaggcaaatcagcccaattaggtctccacccctgactcccctcagccatagaaggccccaccccagtctcagccctactccactcaagcactatagttgtagcaggaatcttcttactcatccgcttccaccccctagcagaaaatagcccactaatccaaactctaacactatgcttaggcgctatcaccactctgttcgcagcagtctgcgcccttacacaaaatgacatcaaaaaaatcgtagccttctccacttcaagtcaactaggactcataatagttacaatcggcatcaaccaaccacacctagcattcctgcacatctgtacccacgccttcttcaaagccatactatttatgtgctccgggtccatcatccacaaccttaacaatgaacaagatattcgaaaaataggaggactactcaaaaccatacctctcacttcaacctccctcaccattggcagcctagcattagcaggaatacctttcctcacaggtttctactccaaagaccacatcatcgaaaccgcaaacatatcatacacaaacgcctgagccctatctattactctcatcgctacctccctgacaagcgcctatagcactcgaataattcttctcaccctaacaggtcaacctcgcttccccacccttactaacattaacgaaaataaccccaccctactaaaccccattaaacgcctggcagccggaagcctattcgcaggatttctcattactaacaacatttcccccgcatcccccttccaaacaacaatccccctctacctaaaactcacagccctcgctgtcactttcctaggacttctaacagccctagacctcaactacctaaccaacaaacttaaaataaaatccccactatgcacattttatttctccaacatactcggattctaccctagcatcacacaccgcacaatcccctatctaggccttcttacgagccaaaacctgcccctactcctcctagacctaacctgactagaaaagctattacctaaaacaatttcacagcaccaaatctccacctccatcatcacctcaacccaaaaaggcataattaaactttacttcctctctttcttcttcccactcatcctaaccctactcctaatcacataacctattcccccgagcaatctcaattacaatatatacaccaacaaacaatgttcaaccagtaactactactaatcaacgcccataatcatacaaagcccccgcaccaataggatcctcccgaatcaaccctgacccctctccttcataaattattcagcttcctacactattaaagtttaccacaaccaccaccccatcatactctttcacccacagcaccaatcctacctccatcgctaaccccactaaaacactcaccaagacctcaacccctgacccccatgcctcaggatactcctcaatagccatcgctgtagtatatccaaagacaaccatcattccccctaaataaattaaaaaaactattaaacccatataacctcccccaaaattcagaataataacacacccgaccacaccgctaacaatcaatactaaacccccataaataggagaaggcttagaagaaaaccccacaaaccccattactaaacccacactcaacagaaacaaagcatacatcattattctcgcacggactacaaccacgaccaatgatatgaaaaaccatcgttgtatttcaactacaagaacaccaatgaccccaatacgcaaaactaaccccctaataaaattaattaaccactcattcatcgacctccccaccccatccaacatctccgcatgatgaaacttcggctcactccttggcgcctgcctgatcctccaaatcaccacaggactattcctagccatgcactactcaccagacgcctcaaccgccttttcatcaatcgcccacatcactcgagacgtaaattatggctgaatcatccgctaccttcacgccaatggcgcctcaatattctttatctgcctcttcctacacatcgggcgaggcctatattacggatcatttctctactcagaaacctgaaacatcggcattatcctcctgcttgcaactatagcaacagccttcataggctatgtcctcccgtgaggccaaatatcattctgaggggccacagtaattacaaacttactatccgccatcccatacattgggacagacctagttcaatgaatctgaggaggctactcagtagacagtcccaccctcacacgattctttacctttcacttcatcttgcccttcattattgcagccctagcaacactccacctcctattcttgcacgaaacgggatcaaacaaccccctaggaatcacctcccattccgataaaatcaccttccacccttactacacaatcaaagacgccctcggcttacttctcttccttctctccttaatgacattaacactattctcaccagacctcctaggcgacccagacaattataccctagccaaccccttaaacacccctccccacatcaagcccgaatgatatttcctattcgcctacacaattctccgatccgtccctaacaaactaggaggcgtccttgccctattactatccatcctcatcctagcaataatccccatcctccatatatccaaacaacaaagcataatatttcgcccactaagccaatcactttattgactcctagccgcagacctcctcattctaacctgaatcggaggacaaccagtaagctacccttttaccatcattggacaagtagcatccgtactatacttcacagacaatcctaatcctaataccaactatctccctaattgaaaacaaaatactcaaatgggcctgtccttgtagtataaactaatacaccagtcttgtaaaccggagatgaaaacctttttccaaggacaaatcagagaaaaagtctttaactccaccattagcacccaaagctaagattctaatttaaactattctctgttctttcatggggaagcagatttgggtaccacccaagtattgactcacccatcaacaaccgctatgtatttcgtacattactgccagccaccatgaatattgtacggtaccataaatacttgaccacctgtagtacataaaaacccaatccacatcaaaaccccctccccatgcttacaagcaagtacagcaatcaaccctcaactatcacacatcaactgcaactccaaagccacccctcacccactaggataccaacaaacctacccacccttaacagtacatagtacataaagccatttaccgtacatagcacattacagtcaaatcccttctcgtccccatggatgacccccctcagataggggtcccttgaccaccatcctccgtgaaatcaatatcccgcacaagagtgctactctcctcgctccgggcccataacacttgggggtagctaaagtgaactgtatccgacatctggttcctacttcagggtcataaagcctaaatagcccacacgttccccttaaataagacatcacgatg

SEQ ID NO: 137 - DNA, 16569 bp, Homo sapiens mitochondrial DNA
  insertion (15999)..(16000): 15999.1INS T
gatcacaggtctatcaccctattaaccactcacgggagctctccatgcatttggtattttcgtctggggggtatgcacgcgatagcattgcgagacgctggagccggagcaccctatgtcgcagtatctgtctttgattcctgcctcatcctattatttatcgcacctacgttcaatattacaggcgaacatacttactaaagtgtgttaattaattaatgcttgtaggacataataataacaattgaatgtctgcacagccactttccacacagacatcataacaaaaaatttccaccaaaccccccctcccccgcttctggccacagcacttaaacacatctctgccaaaccccaaaaacaaagaaccctaacaccagcctaaccagatttcaaattttatcttttggcggtatgcacttttaacagtcaccccccaactaacacattattttcccctcccactcccatactactaatctcatcaatacaacccccgcccatcctacccagcacacacacaccgctgctaaccccataccccgaaccaaccaaaccccaaagacaccccccacagtttatgtagcttacctcctcaaagcaatacactgaaaatgtttagacgggctcacatcaccccataaacaaataggtttggtcctagcctttctattagctcttagtaagattacacatgcaagcatccccgttccagtgagttcaccctctaaatcaccacgatcaaaaggaacaagcatcaagcacgcagcaatgcagctcaaaacgcttagcctagccacacccccacgggaaacagcagtgattaacctttagcaataaacgaaagtttaactaagctatactaaccccagggttggtcaatttcgtgccagccaccgcggtcacacgattaacccaagtcaatagaagccggcgtaaagagtgttttagatcaccccctccccaataaagctaaaactcacctgagttgtaaaaaactccagttgacacaaaatagactacgaaagtggctttaacatatctgaacacacaatagctaagacccaaactgggattagataccccactatgcttagccctaaacctcaacagttaaatcaacaaaactgctcgccagaacactacgagccacagcttaaaactcaaaggacctggcggtgcttcatatccctctagaggagcctgttctgtaatcgataaaccccgatcaacctcaccacctcttgctcagcctatataccgccatcttcagcaaaccctgatgaaggctacaaagtaagcgcaagtacccacgtaaagacgttaggtcaaggtgtagcccatgaggtggcaagaaatgggctacattttctaccccagaaaactacgatagcccttatgaaacttaagggtcgaaggtggatttagcagtaaactaagagtagagtgcttagttgaacagggccctgaagcgcgtacacaccgcccgtcaccctcctcaagtatacttcaaaggacatttaactaaaacccctacgcatttatatagaggagacaagtcgtaacatggtaagtgtactggaaagtgcacttggacgaaccagagtgtagcttaacacaaagcacccaacttacacttaggagatttcaacttaacttgaccgctctgagctaaacctagccccaaacccactccaccttactaccagacaaccttagccaaaccatttacccaaataaagtataggcgatagaaattgaaacctggcgcaatagatatagtaccgcaagggaaagatgaaaaattataaccaagcataatatagcaaggactaacccctataccttctgcataatgaattaactagaaataactttgcaaggagagccaaagctaagacccccgaaaccagacgagctacctaagaacagctaaaagagcacacccgtctatgtagcaaaatagtgggaagatttataggtagaggcgacaaacctaccgagcctggtgatagctggttgtccaagatagaatcttagttcaactttaaatttgcccacagaaccctctaaatccccttgtaaatttaactgttagtccaaagaggaacagctctttggacactaggaaaaaaccttgtagagagagtaaaaaatttaacacccatagtaggcctaaaagcagccaccaattaagaaagcgttcaagctcaacacccactacctaaaaaatcccaaacatataactgaactcctcacacccaattggaccaatctatcaccctatagaagaactaatgttagtataagtaacatgaaaacattctcctccgcataagcctgcgtcagattaaaacactgaactgacaattaacagcccaatatctacaatcaaccaacaagtcattattaccctcactgtcaacccaacacaggcatgctcataaggaaaggttaaaaaaagtaaaaggaactcggcaaatcttaccccgcctgtttaccaaaaacatcacctctagcatcaccagtattagaggcaccgcctgcccagtgacacatgtttaacggccgcggtaccctaaccgtgcaaaggtagcataatcacttgttccttaaatagggacctgtatgaatggctccacgagggttcagctgtctcttacttttaaccagtgaaattgacctgcccgtgaagaggcgggcataacacagcaagacgagaagaccctatggagctttaatttattaatgcaaacagtacctaacaaacccacaggtcctaaactaccaaacctgcattaaaaatttcggttggggcgacctcggagcagaacccaacctccgagcagtacatgctaagacttcaccagtcaaagcgaactactatactcaattgatccaataacttgaccaacggaacaagttaccctagggataacagcgcaatcctattctagagtccatatcaacaatagggtttacgacctcgatgttggatcaggacatcccgatggtgcagccgctattaaaggttcgtttgttcaacgattaaagtcctacgtgatctgagttcagaccggagtaatccaggtcggtttctatctacttcaaattcctccctgtacgaaaggacaagagaaataaggcctacttcacaaagcgccttcccccgtaaatgatatcatctcaacttagtattatacccacacccacccaagaacagggtttgttaagatggcagagcccggtaatcgcataaaacttaaaactttacagtcagaggttcaattcctcttcttaacaacatacccatggccaacctcctactcctcattgtacccattctaatcgcaatggcattcctaatgcttaccgaacgaaaaattctaggctatatacaactacgcaaaggccccaacgttgtaggcccctacgggctactacaacccttcgctgacgccataaaactcttcaccaaagagcccctaaaacccgccacatctaccatcaccctctacatcaccgccccgaccttagctctcaccatcgctcttctactatgaacccccctccccatacccaaccccctggtcaacctcaacctaggcctcctatttattctagccacctctagcctagccgtttactcaatcctctgatcagggtgagcatcaaactcaaactacgccctgatcggcgcactgcgagcagtagcccaaacaatctcatatgaagtcaccctagccatcattctactatcaacattactaataagtggctcctttaacctctccacccttatcacaacacaagaacacctctgattactcctgccatcatgacccttggccataatatgatttatctccacactagcagagaccaaccgaacccccttcgaccttgccgaaggggagtccgaactagtctcaggcttcaacatcgaatacgccgcaggccccttcgccctattcttcatagccgaatacacaaacattattataataaacaccctcaccactacaatcttcctaggaacaacatatgacgcactctcccctgaactctacacaacatattttgtcaccaagaccctacttctaacctccctgttcttatgaattcgaacagcatacccccgattccgctacgaccaactcatacacctcctatgaaaaaacttcctaccactcaccctagcattacttatatgatatgtctccatacccattacaatctccagcattccccctcaaacctaagaaatatgtctgataaaagagttactttgatagagtaaataataggagcttaaacccccttatttctaggactatgagaatcgaacccatccctgagaatccaaaattctccgtgccacctatcacaccccatcctaaagtaaggtcagctaaataagctatcgggcccataccccgaaaatgttggttatacccttcccgtactaattaatcccctggcccaacccgtcatctactctaccatctttgcaggcacactcatcacagcgctaagctcgcactgattttttacctgagtaggcctagaaataaacatgctagcttttattccagttctaaccaaaaaaataaaccctcgttccacagaagctgccatcaagtatttcctcacgcaagcaaccgcatccataatccttctaatagctatcctcttcaacaatatactctccggacaatgaaccataaccaatactaccaatcaatactcatcattaataatcataatagctatagcaataaaactaggaatagccccctttcacttctgagtcccagaggttacccaaggcacccctctgacatccggcctgcttcttctcacatgacaaaaactagcccccatctcaatcatataccaaatctctccctcactaaacgtaagccttctcctcactctctcaatcttatccatcatagcaggcagttgaggtggattaaaccaaacccagctacgcaaaatcttagcatactcctcaattacccacataggatgaataatagcagttctaccgtacaaccctaacataaccattcttaatttaactatttatattatcctaactactaccgcattcctactactcaacttaaactccagcaccacgaccctactactatctcgcacctgaaacaagctaacatgactaacacccttaattccatccaccctcctctccctaggaggcctgcccccgctaaccggctttttgcccaaatgggccattatcgaagaattcacaaaaaacaatagcctcatcatccccaccatcatagccaccatcaccctccttaacctctacttctacctacgcctaatctactccacctcaatcacactactccccatatctaacaacgtaaaaataaaatgacagtttgaacatacaaaacccaccccattcctccccacactcatcgcccttaccacgctactcctacctatctccccttttatactaataatcttatagaaatttaggttaaatacagaccaagagccttcaaagccctcagtaagttgcaatacttaatttctgtaacagctaaggactgcaaaaccccactctgcatcaactgaacgcaaatcagccactttaattaagctaagcccttactagaccaatgggacttaaacccacaaacacttagttaacagctaagcaccctaatcaactggcttcaatctacttctcccgccgccgggaaaaaaggcgggagaagccccggcaggtttgaagctgcttcttcgaatttgcaattcaatatgaaaatcacctcggagctggtaaaaagaggcctaacccctgtctttagatttacagtccaatgcttcactcagccattttacctcacccccactgatgttcgccgaccgttgactattctctacaaaccacaaagacattggaacactatacctattattcggcgcatgagctggagtcctaggcacagctctaagcctccttattcgagccgagctgggccagccaggcaaccttctaggtaacgaccacatctacaacgttatcgtcacagcccatgcatttgtaataatcttcttcatagtaatacccatcataatcggaggctttggcaactgactagttcccctaataatcggtgcccccgatatggcgtttccccgcataaacaacataagcttctgactcttacctccctctctcctactcctgctcgcatctgctatagtggaggccggagcaggaacaggttgaacagtctaccctcccttagcagggaactactcccaccctggagcctccgtagacctaaccatcttctccttacacctagcaggtgtctcctctatcttaggggccatcaatttcatcacaacaattatcaatataaaaccccctgccataacccaataccaaacgcccctcttcgtctgatccgtcctaatcacagcagtcctacttctcctatctctcccagtcctagctgctggcatcactatactactaacagaccgcaacctcaacaccaccttcttcgaccccgccggaggaggagaccccattctataccaacacctattctgatttttcggtcaccctgaagtttatattcttatcctaccaggcttcggaataatctcccatattgtaacttactactccggaaaaaaagaaccatttggatacataggtatggtctgagctatgatatcaattggcttcctagggtttatcgtgtgagcacaccatatatttacagtaggaatagacgtagacacacgagcatatttcacctccgctaccataatcatcgctatccccaccggcgtcaaagtatttagctgactcgccacactccacggaagcaatatgaaatgatctgctgcagtgctctgagccctaggattcatctttcttttcaccgtaggtggcctgactggcattgtattagcaaactcatcactagacatcgtactacacgacacgtactacgttgtagcccacttccactatgtcctatcaataggagctgtatttgccatcataggaggcttcattcactgatttcccctattctcaggctacaccctagaccaaacctacgccaaaatccatttcactatcatattcatcggcgtaaatctaactttcttcccacaacactttctcggcctatccggaatgccccgacgttactcggactaccccgatgcatacaccacatgaaacatcctatcatctgtaggctcattcatttctctaacagcagtaatattaataattttcatgatttgagaagccttcgcttcgaagcgaaaagtcctaatagtagaagaaccctccataaacctggagtgactatatggatgccccccaccctaccacacattcgaagaacccgtatacataaaatctagacaaaaaaggaaggaatcgaaccccccaaagctggtttcaagccaaccccatggcctccatgactttttcaaaaaggtattagaaaaaccatttcataactttgtcaaagttaaattataggctaaatcctatatatcttaatggcacatgcagcgcaagtaggtctacaagacgctacttcccctatcatagaagagcttatcacctttcatgatcacgccctcataatcattttccttatctgcttcctagtcctgtatgcccttttcctaacactcacaacaaaactaactaatactaacatctcagacgctcaggaaatagaaaccgtctgaactatcctgcccgccatcatcctagtcctcatcgccctcccatccctacgcatcctttacataacagacgaggtcaacgatccctcccttaccatcaaatcaattggccaccaatggtactgaacctacgagtacaccgactacggcggactaatcttcaactcctacatacttcccccattattcctagaaccaggcgacctgcgactccttgacgttgacaatcgagtagtactcccgattgaagcccccattcgtataataattacatcacaagacgtcttgcactcatgagctgtccccacattaggcttaaaaacagatgcaattcccggacgtctaaaccaaaccactttcaccgctacacgaccgggggtatactacggtcaatgctctgaaatctgtggagcaaaccacagtttcatgcccatcgtcctagaattaattcccctaaaaatctttgaaatagggcccgtatttaccctatagcaccccctctaccccctctagagcccactgtaaagctaacttagcattaaccttttaagttaaagattaagagaaccaacacctctttacagtgaaatgccccaactaaatactaccgtatggcccaccataattacccccatactccttacactattcctcatcacccaactaaaaatattaaacacaaactaccacctacctccctcaccaaagcccataaaaataaaaaattataacaaaccctgagaaccaaaatgaacgaaaatctgttcgcttcattcattgcccccacaatcctaggcctacccgccgcagtactgatcattctatttccccctctattgatccccacctccaaatatctcatcaacaaccgactaatcaccacccaacaatgactaatcaaactaacctcaaaacaaatgataaccatacacaacactaaaggacgaacctgatctcttatactagtatccttaatcatttttattgccacaactaacctcctcggactcctgcctcactcatttacaccaaccacccaactatctataaacctagccatggccatccccttatgagcgggcacagtgattataggctttcgctctaagattaaaaatgccctagcccacttcttaccacaaggcacacctacaccccttatccccatactagttattatcgaaaccatcagcctactcattcaaccaatagccctggccgtacgcctaaccgctaacattactgcaggccacctactcatgcacctaattggaagcgccaccctagcaatatcaaccattaaccttccctctacacttatcatcttcacaattctaattctactgactatcctagaaatcgctgtcgccttaatccaagcctacgttttcacacttctagtaagcctctacctgcacgacaacacataatgacccaccaatcacatgcctatcatatagtaaaacccagcccatgacccctaacaggggccctctcagccctcctaatgacctccggcctagccatgtgatttcacttccactccataacgctcctcatactaggcctactaaccaacacactaaccatataccaatgatggcgcgatgtaacacgagaaagcacataccaaggccaccacacaccacctgtccaaaaaggccttcgatacgggataatcctatttattacctcagaagtttttttcttcgcaggatttttctgagccttttaccactccagcctagcccctaccccccaattaggagggcactggcccccaacaggcatcaccccgctaaatcccctagaagtcccactcctaaacacatccgtattactcgcatcaggagtatcaatcacctgagctcaccatagtctaatagaaaacaaccgaaaccaaataattcaagcactgcttattacaattttactgggtctctattttaccctcctacaagcctcagagtacttcgagtctcccttcaccatttccgacggcatctacggctcaacattttttgtagccacaggcttccacggacttcacgtcattattggctcaactttcctcactatctgcttcatccgccaactaatatttcactttacatccaaacatcactttggcttcgaagccgccgcctgatactggcattttgtagatgtggtttgactatttctgtatgtctccatctattgatgagggtcttactcttttagtataaatagtaccgttaacttccaattaactagttttgacaacattcaaaaaagagtaataaacttcgccttaattttaataatcaacaccctcctagccttactactaataattattacattttgactaccacaactcaacggctacatagaaaaatccaccccttacgagtgcggcttcgaccctatatcccccgcccgcgtccctttctccataaaattcttcttagtagctattaccttcttattatttgatctagaaattgccctccttttacccctaccatgagccctacaaacaactaacctgccactaatagttatgtcatccctcttattaatcatcatcctagccctaagtctggcctatgagtgactacaaaaaggattagactgaaccgaattggtatatagtttaaacaaaacgaatgatttcgactcattaaattatgataatcatatttaccaaatgcccctcatttacataaatattatactagcatttaccatctcacttctaggaatactagtatatcgctcacacctcatatcctccctactatgcctagaaggaataatactatcgctgttcattatagctactctcataaccctcaacacccactccctcttagccaatattgtgcctattgccatactagtctttgccgcctgcgaagcagcggtgggcctagccctactagtctcaatctccaacacatatggcctagactacgtacataacctaaacctactccaatgctaaaactaatcgtcccaacaattatattactaccactgacatgactttccaaaaaacacataatttgaatcaacacaaccacccacagcctaattattagcatcatccctctactattttttaaccaaatcaacaacaacctatttagctgttccccaaccttttcctccgaccccctaacaacccccctcctaatactaactacctgactcctacccctcacaatcatggcaagccaacgccacttatccagtgaaccactatcacgaaaaaaactctacctctctatactaatctccctacaaatctccttaattataacattcacagccacagaactaatcatattttatatcttcttcgaaaccacacttatccccaccttggctatcatcacccgatgaggcaaccagccagaacgcctgaacgcaggcacatacttcctattctacaccctagtaggctcccttcccctactcatcgcactaatttacactcacaacaccctaggctcactaaacattctactactcactctcactgcccaagaactatcaaactcctgagccaacaacttaatatgactagcttacacaatagcttttatagtaaagatacctctttacggactccacttatgactccctaaagcccatgtcgaagcccccatcgctgggtcaatagtacttgccgcagtactcttaaaactaggcggctatggtataatacgcctcacactcattctcaaccccctgacaaaacacatagcctaccccttccttgtactatccctatgaggcataattataacaagctccatctgcctacgacaaacagacctaaaatcgctcattgcatactcttcaatcagccacatagccctcgtagtaacagccattctcatccaaaccccctgaagcttcaccggcgcagtcattctcataatcgcccacgggcttacatcctcattactattctgcctagcaaactcaaactacgaacgcactcacagtcgcatcataatcctctctcaaggacttcaaactctactcccactaatagctttttgatgacttctagcaagcctcgctaacctcgccttaccccccactattaacctactgggagaactctctgtgctagtaaccacgttctcctgatcaaatatcactctcctacttacaggactcaacatactagtcacagccctatactccctctacatatttaccacaacacaatggggctcactcacccaccacattaacaacataaaaccctcattcacacgagaaaacaccctcatgttcatacacctatcccccattctcctcctatccctcaaccccgacatcattaccgggttttcctcttgtaaatatagtttaaccaaaacatcagattgtgaatctgacaacagaggcttacgaccccttatttaccgagaaagctcacaagaactgctaactcatgcccccatgtctaacaacatggctttctcaacttttaaaggataacagctatccattggtcttaggccccaaaaattttggtgcaactccaaataaaagtaataaccatgcacactactataaccaccctaaccctgacttccctaattccccccatccttaccaccctcgttaaccctaacaaaaaaaactcatacccccattatgtaaaatccattgtcgcatccacctttattatcagtctcttccccacaacaatattcatgtgcctagaccaagaagttattatctcgaactgacactgagccacaacccaaacaacccagctctccctaagcttcaaactagactacttctccataatattcatccctgtagcattgttcgttacatggtccatcatagaattctcactgtgatatataaactcagacccaaacattaatcagttcttcaaatatctactcatcttcctaattaccatactaatcttagttaccgctaacaacctattccaactgttcatcggctgagagggcgtaggaattatatccttcttgctcatcagttgatgatacgcccgagcagatgccaacacagcagccattcaagcaatcctatacaaccgtatcggcgatatcggtttcatcctcgccttagcatgatttatcctacactccaactcatgagacccacaacaaatagcccttctaaacgctaatccaagcctcaccccactactaggcctcctcctagcagcagcaggcaaatcagcccaattaggtctccacccctgactcccctcagccatagaaggccccaccccagtctcagccctactccactcaagcactatagttgtagcaggaatcttcttactcatccgcttccaccccctagcagaaaatagcccactaatccaaactctaacactatgcttaggcgctatcaccactctgttcgcagcagtctgcgcccttacacaaaatgacatcaaaaaaatcgtagccttctccacttcaagtcaactaggactcataatagttacaatcggcatcaaccaaccacacctagcattcctgcacatctgtacccacgccttcttcaaagccatactatttatgtgctccgggtccatcatccacaaccttaacaatgaacaagatattcgaaaaataggaggactactcaaaaccatacctctcacttcaacctccctcaccattggcagcctagcattagcaggaatacctttcctcacaggtttctactccaaagaccacatcatcgaaaccgcaaacatatcatacacaaacgcctgagccctatctattactctcatcgctacctccctgacaagcgcctatagcactcgaataattcttctcaccctaacaggtcaacctcgcttccccacccttactaacattaacgaaaataaccccaccctactaaaccccattaaacgcctggcagccggaagcctattcgcaggatttctcattactaacaacatttcccccgcatcccccttccaaacaacaatccccctctacctaaaactcacagccctcgctgtcactttcctaggacttctaacagccctagacctcaactacctaaccaacaaacttaaaataaaatccccactatgcacattttatttctccaacatactcggattctaccctagcatcacacaccgcacaatcccctatctaggccttcttacgagccaaaacctgcccctactcctcctagacctaacctgactagaaaagctattacctaaaacaatttcacagcaccaaatctccacctccatcatcacctcaacccaaaaaggcataattaaactttacttcctctctttcttcttcccactcatcctaaccctactcctaatcacataacctattcccccgagcaatctcaattacaatatatacaccaacaaacaatgttcaaccagtaactactactaatcaacgcccataatcatacaaagcccccgcaccaataggatcctcccgaatcaaccctgacccctctccttcataaattattcagcttcctacactattaaagtttaccacaaccaccaccccatcatactctttcacccacagcaccaatcctacctccatcgctaaccccactaaaacactcaccaagacctcaacccctgacccccatgcctcaggatactcctcaatagccatcgctgtagtatatccaaagacaaccatcattccccctaaataaattaaaaaaactattaaacccatataacctcccccaaaattcagaataataacacacccgaccacaccgctaacaatcaatactaaacccccataaataggagaaggcttagaagaaaaccccacaaaccccattactaaacccacactcaacagaaacaaagcatacatcattattctcgcacggactacaaccacgaccaatgatatgaaaaaccatcgttgtatttcaactacaagaacaccaatgaccccaatacgcaaaactaaccccctaataaaattaattaaccactcattcatcgacctccccaccccatccaacatctccgcatgatgaaacttcggctcactccttggcgcctgcctgatcctccaaatcaccacaggactattcctagccatgcactactcaccagacgcctcaaccgccttttcatcaatcgcccacatcactcgagacgtaaattatggctgaatcatccgctaccttcacgccaatggcgcctcaatattctttatctgcctcttcctacacatcgggcgaggcctatattacggatcatttctctactcagaaacctgaaacatcggcattatcctcctgcttgcaactatagcaacagccttcataggctatgtcctcccgtgaggccaaatatcattctgaggggccacagtaattacaaacttactatccgccatcccatacattgggacagacctagttcaatgaatctgaggaggctactcagtagacagtcccaccctcacacgattctttacctttcacttcatcttgcccttcattattgcagccctagcaacactccacctcctattcttgcacgaaacgggatcaaacaaccccctaggaatcacctcccattccgataaaatcaccttccacccttactacacaatcaaagacgccctcggcttacttctcttccttctctccttaatgacattaacactattctcaccagacctcctaggcgacccagacaattataccctagccaaccccttaaacacccctccccacatcaagcccgaatgatatttcctattcgcctacacaattctccgatccgtccctaacaaactaggaggcgtccttgccctattactatccatcctcatcctagcaataatccccatcctccatatatccaaacaacaaagcataatatttcgcccactaagccaatcactttattgactcctagccgcagacctcctcattctaacctgaatcggaggacaaccagtaagctacccttttaccatcattggacaagtagcatccgtactatacttcacaacaatcctaatcctaataccaactatctccctaattgaaaacaaaatactcaaatgggcctgtccttgtagtataaactaatacaccagtcttgtaaaccggagatgaaaacctttttccaaggacaaatcagagaaaaagtctttaactccaccattagcacccaaagctaatgattctaatttaaactattctctgttctttcatggggaagcagatttgggtaccacccaagtattgactcacccatcaacaaccgctatgtatttcgtacattactgccagccaccatgaatattgtacggtaccataaatacttgaccacctgtagtacataaaaacccaatccacatcaaaaccccctccccatgcttacaagcaagtacagcaatcaaccctcaactatcacacatcaactgcaactccaaagccacccctcacccactaggataccaacaaacctacccacccttaacagtacatagtacataaagccatttaccgtacatagcacattacagtcaaatcccttctcgtccccatggatgacccccctcagataggggtcccttgaccaccatcctccgtgaaatcaatatcccgcacaagagtgctactctcctcgctccgggcccataacacttgggggtagctaaagtgaactgtatccgacatctggttcctacttcagggtcataaagcctaaatagcccacacgttccccttaaataagacatcacgatg

SEQ ID NO: 138 - DNA, 16569 bp, Homo sapiens mitochondrial DNA
  insertion (16359)..(16360): 16359.1INS G
gatcacaggtctatcaccctattaaccactcacgggagctctccatgcatttggtattttcgtctggggggtatgcacgcgatagcattgcgagacgctggagccggagcaccctatgtcgcagtatctgtctttgattcctgcctcatcctattatttatcgcacctacgttcaatattacaggcgaacatacttactaaagtgtgttaattaattaatgcttgtaggacataataataacaattgaatgtctgcacagccactttccacacagacatcataacaaaaaatttccaccaaaccccccctcccccgcttctggccacagcacttaaacacatctctgccaaaccccaaaaacaaagaaccctaacaccagcctaaccagatttcaaattttatcttttggcggtatgcacttttaacagtcaccccccaactaacacattattttcccctcccactcccatactactaatctcatcaatacaacccccgcccatcctacccagcacacacacaccgctgctaaccccataccccgaaccaaccaaaccccaaagacaccccccacagtttatgtagcttacctcctcaaagcaatacactgaaaatgtttagacgggctcacatcaccccataaacaaataggtttggtcctagcctttctattagctcttagtaagattacacatgcaagcatccccgttccagtgagttcaccctctaaatcaccacgatcaaaaggaacaagcatcaagcacgcagcaatgcagctcaaaacgcttagcctagccacacccccacgggaaacagcagtgattaacctttagcaataaacgaaagtttaactaagctatactaaccccagggttggtcaatttcgtgccagccaccgcggtcacacgattaacccaagtcaatagaagccggcgtaaagagtgttttagatcaccccctccccaataaagctaaaactcacctgagttgtaaaaaactccagttgacacaaaatagactacgaaagtggctttaacatatctgaacacacaatagctaagacccaaactgggattagataccccactatgcttagccctaaacctcaacagttaaatcaacaaaactgctcgccagaacactacgagccacagcttaaaactcaaaggacctggcggtgcttcatatccctctagaggagcctgttctgtaatcgataaaccccgatcaacctcaccacctcttgctcagcctatataccgccatcttcagcaaaccctgatgaaggctacaaagtaagcgcaagtacccacgtaaagacgttaggtcaaggtgtagcccatgaggtggcaagaaatgggctacattttctaccccagaaaactacgatagcccttatgaaacttaagggtcgaaggtggatttagcagtaaactaagagtagagtgcttagttgaacagggccctgaagcgcgtacacaccgcccgtcaccctcctcaagtatacttcaaaggacatttaactaaaacccctacgcatttatatagaggagacaagtcgtaacatggtaagtgtactggaaagtgcacttggacgaaccagagtgtagcttaacacaaagcacccaacttacacttaggagatttcaacttaacttgaccgctctgagctaaacctagccccaaacccactccaccttactaccagacaaccttagccaaaccatttacccaaataaagtataggcgatagaaattgaaacctggcgcaatagatatagtaccgcaagggaaagatgaaaaattataaccaagcataatatagcaaggactaacccctataccttctgcataatgaattaactagaaataactttgcaaggagagccaaagctaagacccccgaaaccagacgagctacctaagaacagctaaaagagcacacccgtctatgtagcaaaatagtgggaagatttataggtagaggcgacaaacctaccgagcctggtgatagctggttgtccaagatagaatcttagttcaactttaaatttgcccacagaaccctctaaatccccttgtaaatttaactgttagtccaaagaggaacagctctttggacactaggaaaaaaccttgtagagagagtaaaaaatttaacacccatagtaggcctaaaagcagccaccaattaagaaagcgttcaagctcaacacccactacctaaaaaatcccaaacatataactgaactcctcacacccaattggaccaatctatcaccctatagaagaactaatgttagtataagtaacatgaaaacattctcctccgcataagcctgcgtcagattaaaacactgaactgacaattaacagcccaatatctacaatcaaccaacaagtcattattaccctcactgtcaacccaacacaggcatgctcataaggaaaggttaaaaaaagtaaaaggaactcggcaaatcttaccccgcctgtttaccaaaaacatcacctctagcatcaccagtattagaggcaccgcctgcccagtgacacatgtttaacggccgcggtaccctaaccgtgcaaaggtagcataatcacttgttccttaaatagggacctgtatgaatggctccacgagggttcagctgtctcttacttttaaccagtgaaattgacctgcccgtgaagaggcgggcataacacagcaagacgagaagaccctatggagctttaatttattaatgcaaacagtacctaacaaacccacaggtcctaaactaccaaacctgcattaaaaatttcggttggggcgacctcggagcagaacccaacctccgagcagtacatgctaagacttcaccagtcaaagcgaactactatactcaattgatccaataacttgaccaacggaacaagttaccctagggataacagcgcaatcctattctagagtccatatcaacaatagggtttacgacctcgatgttggatcaggacatcccgatggtgcagccgctattaaaggttcgtttgttcaacgattaaagtcctacgtgatctgagttcagaccggagtaatccaggtcggtttctatctacttcaaattcctccctgtacgaaaggacaagagaaataaggcctacttcacaaagcgccttcccccgtaaatgatatcatctcaacttagtattatacccacacccacccaagaacagggtttgttaagatggcagagcccggtaatcgcataaaacttaaaactttacagtcagaggttcaattcctcttcttaacaacatacccatggccaacctcctactcctcattgtacccattctaatcgcaatggcattcctaatgcttaccgaacgaaaaattctaggctatatacaactacgcaaaggccccaacgttgtaggcccctacgggctactacaacccttcgctgacgccataaaactcttcaccaaagagcccctaaaacccgccacatctaccatcaccctctacatcaccgccccgaccttagctctcaccatcgctcttctactatgaacccccctccccatacccaaccccctggtcaacctcaacctaggcctcctatttattctagccacctctagcctagccgtttactcaatcctctgatcagggtgagcatcaaactcaaactacgccctgatcggcgcactgcgagcagtagcccaaacaatctcatatgaagtcaccctagccatcattctactatcaacattactaataagtggctcctttaacctctccacccttatcacaacacaagaacacctctgattactcctgccatcatgacccttggccataatatgatttatctccacactagcagagaccaaccgaacccccttcgaccttgccgaaggggagtccgaactagtctcaggcttcaacatcgaatacgccgcaggccccttcgccctattcttcatagccgaatacacaaacattattataataaacaccctcaccactacaatcttcctaggaacaacatatgacgcactctcccctgaactctacacaacatattttgtcaccaagaccctacttctaacctccctgttcttatgaattcgaacagcatacccccgattccgctacgaccaactcatacacctcctatgaaaaaacttcctaccactcaccctagcattacttatatgatatgtctccatacccattacaatctccagcattccccctcaaacctaagaaatatgtctgataaaagagttactttgatagagtaaataataggagcttaaacccccttatttctaggactatgagaatcgaacccatccctgagaatccaaaattctccgtgccacctatcacaccccatcctaaagtaaggtcagctaaataagctatcgggcccataccccgaaaatgttggttatacccttcccgtactaattaatcccctggcccaacccgtcatctactctaccatctttgcaggcacactcatcacagcgctaagctcgcactgattttttacctgagtaggcctagaaataaacatgctagcttttattccagttctaaccaaaaaaataaaccctcgttccacagaagctgccatcaagtatttcctcacgcaagcaaccgcatccataatccttctaatagctatcctcttcaacaatatactctccggacaatgaaccataaccaatactaccaatcaatactcatcattaataatcataatagctatagcaataaaactaggaatagccccctttcacttctgagtcccagaggttacccaaggcacccctctgacatccggcctgcttcttctcacatgacaaaaactagcccccatctcaatcatataccaaatctctccctcactaaacgtaagccttctcctcactctctcaatcttatccatcatagcaggcagttgaggtggattaaaccaaacccagctacgcaaaatcttagcatactcctcaattacccacataggatgaataatagcagttctaccgtacaaccctaacataaccattcttaatttaactatttatattatcctaactactaccgcattcctactactcaacttaaactccagcaccacgaccctactactatctcgcacctgaaacaagctaacatgactaacacccttaattccatccaccctcctctccctaggaggcctgcccccgctaaccggctttttgcccaaatgggccattatcgaagaattcacaaaaaacaatagcctcatcatccccaccatcatagccaccatcaccctccttaacctctacttctacctacgcctaatctactccacctcaatcacactactccccatatctaacaacgtaaaaataaaatgacagtttgaacatacaaaacccaccccattcctccccacactcatcgcccttaccacgctactcctacctatctccccttttatactaataatcttatagaaatttaggttaaatacagaccaagagccttcaaagccctcagtaagttgcaatacttaatttctgtaacagctaaggactgcaaaaccccactctgcatcaactgaacgcaaatcagccactttaattaagctaagcccttactagaccaatgggacttaaacccacaaacacttagttaacagctaagcaccctaatcaactggcttcaatctacttctcccgccgccgggaaaaaaggcgggagaagccccggcaggtttgaagctgcttcttcgaatttgcaattcaatatgaaaatcacctcggagctggtaaaaagaggcctaacccctgtctttagatttacagtccaatgcttcactcagccattttacctcacccccactgatgttcgccgaccgttgactattctctacaaaccacaaagacattggaacactatacctattattcggcgcatgagctggagtcctaggcacagctctaagcctccttattcgagccgagctgggccagccaggcaaccttctaggtaacgaccacatctacaacgttatcgtcacagcccatgcatttgtaataatcttcttcatagtaatacccatcataatcggaggctttggcaactgactagttcccctaataatcggtgcccccgatatggcgtttccccgcataaacaacataagcttctgactcttacctccctctctcctactcctgctcgcatctgctatagtggaggccggagcaggaacaggttgaacagtctaccctcccttagcagggaactactcccaccctggagcctccgtagacctaaccatcttctccttacacctagcaggtgtctcctctatcttaggggccatcaatttcatcacaacaattatcaatataaaaccccctgccataacccaataccaaacgcccctcttcgtctgatccgtcctaatcacagcagtcctacttctcctatctctcccagtcctagctgctggcatcactatactactaacagaccgcaacctcaacaccaccttcttcgaccccgccggaggaggagaccccattctataccaacacctattctgatttttcggtcaccctgaagtttatattcttatcctaccaggcttcggaataatctcccatattgtaacttactactccggaaaaaaagaaccatttggatacataggtatggtctgagctatgatatcaattggcttcctagggtttatcgtgtgagcacaccatatatttacagtaggaatagacgtagacacacgagcatatttcacctccgctaccataatcatcgctatccccaccggcgtcaaagtatttagctgactcgccacactccacggaagcaatatgaaatgatctgctgcagtgctctgagccctaggattcatctttcttttcaccgtaggtggcctgactggcattgtattagcaaactcatcactagacatcgtactacacgacacgtactacgttgtagcccacttccactatgtcctatcaataggagctgtatttgccatcataggaggcttcattcactgatttcccctattctcaggctacaccctagaccaaacctacgccaaaatccatttcactatcatattcatcggcgtaaatctaactttcttcccacaacactttctcggcctatccggaatgccccgacgttactcggactaccccgatgcatacaccacatgaaacatcctatcatctgtaggctcattcatttctctaacagcagtaatattaataattttcatgatttgagaagccttcgcttcgaagcgaaaagtcctaatagtagaagaaccctccataaacctggagtgactatatggatgccccccaccctaccacacattcgaagaacccgtatacataaaatctagacaaaaaaggaaggaatcgaaccccccaaagctggtttcaagccaaccccatggcctccatgactttttcaaaaaggtattagaaaaaccatttcataactttgtcaaagttaaattataggctaaatcctatatatcttaatggcacatgcagcgcaagtaggtctacaagacgctacttcccctatcatagaagagcttatcacctttcatgatcacgccctcataatcattttccttatctgcttcctagtcctgtatgcccttttcctaacactcacaacaaaactaactaatactaacatctcagacgctcaggaaatagaaaccgtctgaactatcctgcccgccatcatcctagtcctcatcgccctcccatccctacgcatcctttacataacagacgaggtcaacgatccctcccttaccatcaaatcaattggccaccaatggtactgaacctacgagtacaccgactacggcggactaatcttcaactcctacatacttcccccattattcctagaaccaggcgacctgcgactccttgacgttgacaatcgagtagtactcccgattgaagcccccattcgtataataattacatcacaagacgtcttgcactcatgagctgtccccacattaggcttaaaaacagatgcaattcccggacgtctaaaccaaaccactttcaccgctacacgaccgggggtatactacggtcaatgctctgaaatctgtggagcaaaccacagtttcatgcccatcgtcctagaattaattcccctaaaaatctttgaaatagggcccgtatttaccctatagcaccccctctaccccctctagagcccactgtaaagctaacttagcattaaccttttaagttaaagattaagagaaccaacacctctttacagtgaaatgccccaactaaatactaccgtatggcccaccataattacccccatactccttacactattcctcatcacccaactaaaaatattaaacacaaactaccacctacctccctcaccaaagcccataaaaataaaaaattataacaaaccctgagaaccaaaatgaacgaaaatctgttcgcttcattcattgcccccacaatcctaggcctacccgccgcagtactgatcattctatttccccctctattgatccccacctccaaatatctcatcaacaaccgactaatcaccacccaacaatgactaatcaaactaacctcaaaacaaatgataaccatacacaacactaaaggacgaacctgatctcttatactagtatccttaatcatttttattgccacaactaacctcctcggactcctgcctcactcatttacaccaaccacccaactatctataaacctagccatggccatccccttatgagcgggcacagtgattataggctttcgctctaagattaaaaatgccctagcccacttcttaccacaaggcacacctacaccccttatccccatactagttattatcgaaaccatcagcctactcattcaaccaatagccctggccgtacgcctaaccgctaacattactgcaggccacctactcatgcacctaattggaagcgccaccctagcaatatcaaccattaaccttccctctacacttatcatcttcacaattctaattctactgactatcctagaaatcgctgtcgccttaatccaagcctacgttttcacacttctagtaagcctctacctgcacgacaacacataatgacccaccaatcacatgcctatcatatagtaaaacccagcccatgacccctaacaggggccctctcagccctcctaatgacctccggcctagccatgtgatttcacttccactccataacgctcctcatactaggcctactaaccaacacactaaccatataccaatgatggcgcgatgtaacacgagaaagcacataccaaggccaccacacaccacctgtccaaaaaggccttcgatacgggataatcctatttattacctcagaagtttttttcttcgcaggatttttctgagccttttaccactccagcctagcccctaccccccaattaggagggcactggcccccaacaggcatcaccccgctaaatcccctagaagtcccactcctaaacacatccgtattactcgcatcaggagtatcaatcacctgagctcaccatagtctaatagaaaacaaccgaaaccaaataattcaagcactgcttattacaattttactgggtctctattttaccctcctacaagcctcagagtacttcgagtctcccttcaccatttccgacggcatctacggctcaacattttttgtagccacaggcttccacggacttcacgtcattattggctcaactttcctcactatctgcttcatccgccaactaatatttcactttacatccaaacatcactttggcttcgaagccgccgcctgatactggcattttgtagatgtggtttgactatttctgtatgtctccatctattgatgagggtcttactcttttagtataaatagtaccgttaacttccaattaactagttttgacaacattcaaaaaagagtaataaacttcgccttaattttaataatcaacaccctcctagccttactactaataattattacattttgactaccacaactcaacggctacatagaaaaatccaccccttacgagtgcggcttcgaccctatatcccccgcccgcgtccctttctccataaaattcttcttagtagctattaccttcttattatttgatctagaaattgccctccttttacccctaccatgagccctacaaacaactaacctgccactaatagttatgtcatccctcttattaatcatcatcctagccctaagtctggcctatgagtgactacaaaaaggattagactgaaccgaattggtatatagtttaaacaaaacgaatgatttcgactcattaaattatgataatcatatttaccaaatgcccctcatttacataaatattatactagcatttaccatctcacttctaggaatactagtatatcgctcacacctcatatcctccctactatgcctagaaggaataatactatcgctgttcattatagctactctcataaccctcaacacccactccctcttagccaatattgtgcctattgccatactagtctttgccgcctgcgaagcagcggtgggcctagccctactagtctcaatctccaacacatatggcctagactacgtacataacctaaacctactccaatgctaaaactaatcgtcccaacaattatattactaccactgacatgactttccaaaaaacacataatttgaatcaacacaaccacccacagcctaattattagcatcatccctctactattttttaaccaaatcaacaacaacctatttagctgttccccaaccttttcctccgaccccctaacaacccccctcctaatactaactacctgactcctacccctcacaatcatggcaagccaacgccacttatccagtgaaccactatcacgaaaaaaactctacctctctatactaatctccctacaaatctccttaattataacattcacagccacagaactaatcatattttatatcttcttcgaaaccacacttatccccaccttggctatcatcacccgatgaggcaaccagccagaacgcctgaacgcaggcacatacttcctattctacaccctagtaggctcccttcccctactcatcgcactaatttacactcacaacaccctaggctcactaaacattctactactcactctcactgcccaagaactatcaaactcctgagccaacaacttaatatgactagcttacacaatagcttttatagtaaagatacctctttacggactccacttatgactccctaaagcccatgtcgaagcccccatcgctgggtcaatagtacttgccgcagtactcttaaaactaggcggctatggtataatacgcctcacactcattctcaaccccctgacaaaacacatagcctaccccttccttgtactatccctatgaggcataattataacaagctccatctgcctacgacaaacagacctaaaatcgctcattgcatactcttcaatcagccacatagccctcgtagtaacagccattctcatccaaaccccctgaagcttcaccggcgcagtcattctcataatcgcccacgggcttacatcctcattactattctgcctagcaaactcaaactacgaacgcactcacagtcgcatcataatcctctctcaaggacttcaaactctactcccactaatagctttttgatgacttctagcaagcctcgctaacctcgccttaccccccactattaacctactgggagaactctctgtgctagtaaccacgttctcctgatcaaatatcactctcctacttacaggactcaacatactagtcacagccctatactccctctacatatttaccacaacacaatggggctcactcacccaccacattaacaacataaaaccctcattcacacgagaaaacaccctcatgttcatacacctatcccccattctcctcctatccctcaaccccgacatcattaccgggttttcctcttgtaaatatagtttaaccaaaacatcagattgtgaatctgacaacagaggcttacgaccccttatttaccgagaaagctcacaagaactgctaactcatgcccccatgtctaacaacatggctttctcaacttttaaaggataacagctatccattggtcttaggccccaaaaattttggtgcaactccaaataaaagtaataaccatgcacactactataaccaccctaaccctgacttccctaattccccccatccttaccaccctcgttaaccctaacaaaaaaaactcatacccccattatgtaaaatccattgtcgcatccacctttattatcagtctcttccccacaacaatattcatgtgcctagaccaagaagttattatctcgaactgacactgagccacaacccaaacaacccagctctccctaagcttcaaactagactacttctccataatattcatccctgtagcattgttcgttacatggtccatcatagaattctcactgtgatatataaactcagacccaaacattaatcagttcttcaaatatctactcatcttcctaattaccatactaatcttagttaccgctaacaacctattccaactgttcatcggctgagagggcgtaggaattatatccttcttgctcatcagttgatgatacgcccgagcagatgccaacacagcagccattcaagcaatcctatacaaccgtatcggcgatatcggtttcatcctcgccttagcatgatttatcctacactccaactcatgagacccacaacaaatagcccttctaaacgctaatccaagcctcaccccactactaggcctcctcctagcagcagcaggcaaatcagcccaattaggtctccacccctgactcccctcagccatagaaggccccaccccagtctcagccctactccactcaagcactatagttgtagcaggaatcttcttactcatccgcttccaccccctagcagaaaatagcccactaatccaaactctaacactatgcttaggcgctatcaccactctgttcgcagcagtctgcgcccttacacaaaatgacatcaaaaaaatcgtagccttctccacttcaagtcaactaggactcataatagttacaatcggcatcaaccaaccacacctagcattcctgcacatctgtacccacgccttcttcaaagccatactatttatgtgctccgggtccatcatccacaaccttaacaatgaacaagatattcgaaaaataggaggactactcaaaaccatacctctcacttcaacctccctcaccattggcagcctagcattagcaggaatacctttcctcacaggtttctactccaaagaccacatcatcgaaaccgcaaacatatcatacacaaacgcctgagccctatctattactctcatcgctacctccctgacaagcgcctatagcactcgaataattcttctcaccctaacaggtcaacctcgcttccccacccttactaacattaacgaaaataaccccaccctactaaaccccattaaacgcctggcagccggaagcctattcgcaggatttctcattactaacaacatttcccccgcatcccccttccaaacaacaatccccctctacctaaaactcacagccctcgctgtcactttcctaggacttctaacagccctagacctcaactacctaaccaacaaacttaaaataaaatccccactatgcacattttatttctccaacatactcggattctaccctagcatcacacaccgcacaatcccctatctaggccttcttacgagccaaaacctgcccctactcctcctagacctaacctgactagaaaagctattacctaaaacaatttcacagcaccaaatctccacctccatcatcacctcaacccaaaaaggcataattaaactttacttcctctctttcttcttcccactcatcctaaccctactcctaatcacataacctattcccccgagcaatctcaattacaatatatacaccaacaaacaatgttcaaccagtaactactactaatcaacgcccataatcatacaaagcccccgcaccaataggatcctcccgaatcaaccctgacccctctccttcataaattattcagcttcctacactattaaagtttaccacaaccaccaccccatcatactctttcacccacagcaccaatcctacctccatcgctaaccccactaaaacactcaccaagacctcaacccctgacccccatgcctcaggatactcctcaatagccatcgctgtagtatatccaaagacaaccatcattccccctaaataaattaaaaaaactattaaacccatataacctcccccaaaattcagaataataacacacccgaccacaccgctaacaatcaatactaaacccccataaataggagaaggcttagaagaaaaccccacaaaccccattactaaacccacactcaacagaaacaaagcatacatcattattctcgcacggactacaaccacgaccaatgatatgaaaaaccatcgttgtatttcaactacaagaacaccaatgaccccaatacgcaaaactaaccccctaataaaattaattaaccactcattcatcgacctccccaccccatccaacatctccgcatgatgaaacttcggctcactccttggcgcctgcctgatcctccaaatcaccacaggactattcctagccatgcactactcaccagacgcctcaaccgccttttcatcaatcgcccacatcactcgagacgtaaattatggctgaatcatccgctaccttcacgccaatggcgcctcaatattctttatctgcctcttcctacacatcgggcgaggcctatattacggatcatttctctactcagaaacctgaaacatcggcattatcctcctgcttgcaactatagcaacagccttcataggctatgtcctcccgtgaggccaaatatcattctgaggggccacagtaattacaaacttactatccgccatcccatacattgggacagacctagttcaatgaatctgaggaggctactcagtagacagtcccaccctcacacgattctttacctttcacttcatcttgcccttcattattgcagccctagcaacactccacctcctattcttgcacgaaacgggatcaaacaaccccctaggaatcacctcccattccgataaaatcaccttccacccttactacacaatcaaagacgccctcggcttacttctcttccttctctccttaatgacattaacactattctcaccagacctcctaggcgacccagacaattataccctagccaaccccttaaacacccctccccacatcaagcccgaatgatatttcctattcgcctacacaattctccgatccgtccctaacaaactaggaggcgtccttgccctattactatccatcctcatcctagcaataatccccatcctccatatatccaaacaacaaagcataatatttcgcccactaagccaatcactttattgactcctagccgcagacctcctcattctaacctgaatcggaggacaaccagtaagctacccttttaccatcattggacaagtagcatccgtactatacttcacaacaatcctaatcctaataccaactatctccctaattgaaaacaaaatactcaaatgggcctgtccttgtagtataaactaatacaccagtcttgtaaaccggagatgaaaacctttttccaaggacaaatcagagaaaaagtctttaactccaccattagcacccaaagctaagattctaatttaaactattctctgttctttcatggggaagcagatttgggtaccacccaagtattgactcacccatcaacaaccgctatgtatttcgtacattactgccagccaccatgaatattgtacggtaccataaatacttgaccacctgtagtacataaaaacccaatccacatcaaaaccccctccccatgcttacaagcaagtacagcaatcaaccctcaactatcacacatcaactgcaactccaaagccacccctcacccactaggataccaacaaacctacccacccttaacagtacatagtacataaagccatttaccgtacatagcacattacagtcaaatcccttctgcgtccccatggatgacccccctcagataggggtcccttgaccaccatcctccgtgaaatcaatatcccgcacaagagtgctactctcctcgctccgggcccataacacttgggggtagctaaagtgaactgtatccgacatctggttcctacttcagggtcataaagcctaaatagcccacacgttccccttaaataagacatcacgatg
